(19) United States
(12) Patent Application Publication
(10) Pub. No.: US 2010/0280987 A1
(43) Pub. Date: Nov. 4, 2010

(54) METHODS AND GENE EXPRESSION SIGNATURE FOR ASSESSING RAS PATHWAY ACTIVITY

(76) Inventors: Andrey Loboda, Philadelphia, PA (US); Michael Nebozhyn, Yeadon, PA (US); Theresa Zhang, Wellesley, MA (US); James W. Watters, Chalfont, PA (US); Pearl S. Huang, Lansdale, PA (US); Michael Chastain, Glenside, PA (US); Richard A. Klinghoffer, Seattle, WA (US)

Correspondence Address: MERCK, P O BOX 2000, RAHWAY, NJ, 07065-0907, US

(21) Appl. No.: 12/761,772

(22) Filed: Apr. 16, 2010

Related U.S. Application Data
(60) Provisional application No. 61/212,987, filed on Apr. 18, 2009.

(51) Int. Cl. G06N 5/02; G06F 19/00

(52) U.S. Cl. 706/54; 702/19

(57) ABSTRACT

Methods, biomarkers, and expression signatures are disclosed for assessing the regulation status of RAS pathway signaling in a cell sample or subject. More specifically, several aspects of the invention provide a set of genes which can be used as biomarkers and gene signatures for evaluating RAS pathway deregulation status in a sample; classifying a cell sample as having a deregulated or regulated RAS signaling pathway; determining whether an agent modulates the RAS signaling pathway in sample; predicting response of a subject to an agent that modulates the RAS signaling pathway; assigning treatment to a subject; and evaluating the pharmacodynamic effects of cancer therapies designed to regulate RAS pathway signaling.

[0001] This application claims the benefit under 35 U.S.C. §119(e) of U.S. Provisional Patent Application No. 61/212,987, filed on Apr. 18, 2009, which is incorporated by reference herein in its entirety.

[0002] The sequence listing of the present application is submitted electronically via EFS-Web, in compliance with 37 CFR §1.52(e)(5), as an ASCII formatted sequence listing with a file name “ROSONC00003USNP-SEQLIST-16APR2010”, creation date of Apr. 16, 2010, and a size of 589,582 bytes. This sequence listing submitted via EFS-Web is part of the specification and is herein incorporated by reference in its entirety.

### 1. BACKGROUND OF THE INVENTION

[0003] The identification of patient subpopulations most likely to respond to therapy is a central goal of modern molecular medicine. This notion is particularly important for cancer due to the large number of approved and experimental therapies (Rothenberg et al., 2003, Nat. Rev. Cancer 3:303-309), low response rates to many current treatments, and clinical importance of using the optimal therapy in the first treatment cycle (Dracopoli, 2005, Curr. Mol. Med. 5:103-110). In addition, the narrow therapeutic index and severe toxicity profiles associated with currently marketed cytotoxics results in a pressing need for accurate response prediction. Although recent studies have identified gene expression signatures associated with response to cytotoxic chemotherapies (Folgueria et al., 2005, Clin. Cancer Res. 11:7434-7443; Ayers et al., 2004, 22:2284-2293; Chang et al., 2003, Lancet 362:362-369; Rouzier et al., 2005, Proc. Natl. Acad. Sci. USA 102: 8315-8320), these examples (and others from the literature) remain unvalidated and have not yet had a major effect on clinical practice. In addition to technical issues, such as lack of a standard technology platform and difficulties surrounding the collection of clinical samples, the myriad of cellular processes affected by cytotoxic chemotherapies may hinder the identification of practical and robust gene expression predictors of response to these agents. One exception may be the recent finding by microarray that low mRNA expression of the microtubule-associate protein Tau is predictive of improved response to paclitaxel (Rouzier et al., supra).

[0004] To improve on the limitations of cytotoxic chemotherapies, current approaches to drug design in oncology are aimed at modulating specific cell signaling pathways important for tumor growth and survival (Hahn and Weinberg, 2002, Nat. Rev. Cancer 2:331-341; Hanahan and Weinberg, 2000, Cell 100:57-70; Trosko et al., 2004, Ann. N.Y. Acad. Sci. 1028:192-201). In cancer cells, these pathways become deregulated resulting in aberrant signaling, inhibition of apoptosis, increased metastasis, and increased cell proliferation (reviewed in Adjei and Hildalgo, 2005, J. Clin. Oncol. 23:5386-5403). Although normal cells integrate multiple signaling pathways for controlled growth and proliferation, tumors seem to be heavily reliant on activation of one or two pathways (“oncogene activation”). In addition to the well-known dependence of chronic myelogenous leukemia on BCR-ABL, studies of the epidermal growth factor receptor and MYC pathways showed that inactivation of a single critical oncogene can induce cell death or differentiation into cells with a normal phenotype (Lynch et al., 2004, N. Engl. J. Med. 350: 2129-2139; Paez et al., 2004, Science 304:1497-1500; Weinstein, 2002, Science 297:63-64; Jain et al., 2002, Science 297:102-104; Gorre et al., 2001, Science 293:876-880; Druker et al., 2001, N. Engl. J. Med. 344:1031-1037). The components of these aberrant signaling pathways represent attractive selective targets for new anticancer therapies. In addition, responder identification for target therapies may be more achievable than for cytotoxics, as it seems logical that patients with tumors that are “driven” by a particular pathway will respond to therapeutics targeting components of that pathway. Therefore, it is crucial that we develop methods to identify which pathways are active in which tumors and use this information to guide therapeutic decisions. One way to enable this is to identify gene expression profiles that are indicative of pathway activation status.

[0005] Current methods for assessing pathway activation in tumors involve the measurement of drug targets, known oncogenes, or known tumor suppressors. However, one pathway can be activated at multiple points, so it is not always feasible to assess pathway activation by evaluating known cancer-associated genes (Downward, 2006, Nature 439:274-275). RAS and its effectors regulate cell growth, differentiation, motility, survival, and death (Downward, 2002, Nat. Rev. Cancer 3:11-22). RAS proteins are members of a large superfamily of GTP binding proteins that serve as a molecular switch, converting signals from the cell membrane to the nucleus. Some distinct members of the RAS family include HRas, KRas, MRas, NRas, and RRas (Adjei, 2001, J. Nat. Cancer Instit. 93:1062-1073). Deregulation of RAS pathways by mutational activation or by receptor-mediated activation of RAS contribute to human malignancies (Downward, supra). Approximately one third of all human cancers, including cancers of the pancreas, colon, and lung, express a constitutively active RAS (Downward, supra). Aberrant RAS signaling in tumors may also be caused by loss of GTPase activating proteins (GAPs), such as neurofibromin, encoded by NF1; growth factor receptor activation, such as EGFR and ERBB2, or mutation or amplification of RAS effectors, such as BRAF mutation, PTEN loss, AKT2 amplification, or PI3K amplification (Downward, supra). This pathway can be activated by multiple growth factors through receptor tyrosine kinases and has effects on multiple processes, including cell growth and survival, metastatic competence, and therapy resistance (Downward, supra). Therefore, inhibition of RAS or its upstream activators or downstream effectors may be a promising pharmacologic strategy for cancer therapy (Cox and Der, 2002 Curr. Opin. Pharmacol. 2:388-93; Blum and Kloog, 2005, Drug Resist. Updat. 8:369-80; Downward, supra; Dancey, 2002, Curr. Pharm. Des. 8:2259-2267). RAS pathway activation is also an indicator of resistance to therapeutic agents targeting EGFR and PI3K (Massarelli et al., 2007, Clin. Cancer Res. 13:2890-2896; Raponi et al., 2008, Curr. Opin. Pharmacology 8:413-418; Ihle et al., 2009, Cancer Res. 69:143-150). Accordingly, accurate determination of RAS pathway activation will be critical for the identification of potential responders to these emerging novel therapeutics.

[0006] However, the RAS pathway can be activated by aberrations at multiple points, and assessing pathway activity may not be straightforward (Downward, supra). For example, RAS itself (K-RAS, N-RAS, H-RAS) is frequently mutated in cancers. RAS mutations are common in pancreatic, lungadenocarcinoma, and colorectal cancers (Downward, supra). The RAS pathway can also be activated by loss of GAPs, such as neurofibromin (Weiss et al., 1999, Am. J. Med. Genet. 89:14-22); growth factor receptor activation (Mendelsohn and Baselga, 2000, Oncogene 19:6550-6565); and mutation or amplification of RAS pathway effectors (Bellacosa, 1995, Intl. J. Cancer 64:280-285; Simpson and Parsons, 2001, Exp. Cell Res. 264:29-41). Although RAS pathway activation can be assessed by sequence analysis (Bos, 1989, Cancer Res. 49:4682-4689), this may not be the optimal way to measure pathway activation. Sequence analysis of RAS misses other pathway activators and is not quantitative. In addition, oncogenic pathways are complex, so important pathway mediators may be missed by testing only a few well-characterized pathway components.

[0007] Examples like this suggest that a gene expression signature-based readout of pathway activation may be more appropriate than relying on a single indicator of pathway activity, as the same signature of gene expression may be elicited by activation of multiple components of the pathway. In addition, by integrating expression data from multiple genes, a quantitative assessment of pathway activity may be possible. In addition to using gene expression signatures for tumor classification by assessing pathway activation status, gene expression signatures for pathway activation may also be used as pharmacodynamic biomarkers, i.e., monitoring pathway inhibition in patient tumors or peripheral tissues post-treatment; as response prediction biomarkers, i.e., prospectively identifying patients harboring tumors that have high levels of a particular pathway activity before treating the patients with inhibitors targeting the pathway or identifying patients harboring tumors that have high levels of a particular pathway activity and are therefore likely to be resistant to particular inhibitors; and as early efficacy biomarkers, i.e., an early readout of efficacy.

### 2. BRIEF DESCRIPTION OF THE DRAWINGS

[0008] The patent or application file contains at least one drawing executed in color. Copies of this patent or patent application publication with color drawing(s) will be provided by the Office upon request and payment of the necessary fee.

[0009] FIG. 1 shows a summary of RAS pathway activation and gene expression signature. RAS is activated by growth factors through receptor tyrosine kinases. The autophosphorylated receptor binds to the SH2 domain of GRB2. Through its SH3 domain, GRB2 is bound to SOS, so activation of the receptor tyrosine kinase results in recruitment of SOS to the plasma membrane, where RAS is also localized as a result of farnesylation. The increased proximity of SOS to RAS results in increased nucleotide exchange on RAS, with GDP being replaced with GTP. GTP-bound RAS is able to bind and activate several families of effector enzymes (such as the RAF, PI3K, RALGDS, and PLCε pathways). This signaling cascade affects multiple cellular processes and results in a gene expression “signature” of pathway activity. Activation of this pathway has been implicated in many cancers, and this activation can occur via aberrations in multiple pathway components. Because activation of various pathway components may lead to the same gene expression profile, a signature of pathway activation is likely to provide more accurate information than the assessment of a single known oncogene or tumor suppressor.

[0010] FIG. 2 shows that the RAS pathway signature is significantly coherent in panel of breast cancer cell lines. A) Coherency test demonstrates that the “up” and “down” arms of the RAS pathway signature significantly correlates within one arm and anticorrelate between the opposing arms. B) Heatmap showing that “up” and “down” arms of RAS signature cluster apart in breast cancer cell line panel. C) Mean of the genes in the “up” arm is plotted against the mean of the genes in the “down” arm for each breast cell line. The “up” and “down” scores significantly anticorrelate in this dataset. D) Genes remaining after refinement of the signature are shown in the heatmap.

[0011] FIG. 3 show that a different RAS pathway signature identified by Nevin et al., (Nevin's signature) is not coherent in the panel of breast cancer cell lines. A) Coherency test results: genes in the “up” and “down” arms of the Nevins signature do not significantly correlate within one arm and do not anticorrelate between the arms. B) The “up” and “down” arms do not cluster apart in the heatmap. C) Graph showing the mean of the genes in the “up” arm plotted against the mean of the genes in the “down” arm. The “up” and “down” scores correlate, rather than anticorrelate.

[0012] FIG. 4 shows that the inventive RAS pathway signature is consistent with other RAS signatures across four cell line panels. Pair-wise scatter plots for RAS signatures are shown in breast (A); colon (B); lung (C); and lymphoma (D). Significance of Pearson, Kendal, and Spearman correlations are shown for every plot.

[0013] FIG. 5 shows that the RAS pathway signature is predictive of RAS and BRAF mutation status in Colon, Lung, and Breast Cancer Cell Lines. Bar graphs show the signature scores for the RAS pathway in colon (A); lung (B); and breast (C) cancer cell line sets. Each graph is split into two parts according to RAS mutational status. The sorted RAS pathway signature scores for RAS wildtype cell lines are shown on the left, and the sorted RAS pathway signature scores for the mutant cell lines are shown on the right. Prediction of high RAS pathway signature score in non-mutant cell lines may be due to other means of RAS pathway upregulation.

[0014] FIG. 6 shows that the RAS pathway signature is predictive of RAS mutations human NSCLC tumors.

[0015] FIG. 7 shows that the RAS pathway signature is coherent and consistent with other RAS signatures, developed by others, in formalin fixed, paraffin embedded (FFPE) samples obtained from lung, ovarian, and breast tumors. FIGS. 7A, 7C, and 7E, show the coherency of RAS pathway signature in lung, ovarian and breast tumors, respectively. FIGS. 7B, 7D, and 7F, show pairwise correlations between the inventive RAS pathway signature (“ours”) and other RAS signatures in lung, ovarian, and breast tumors, respectively.

[0016] FIG. 8 shows the distribution of RAS pathway signature scores in subtypes of ovarian tumor samples. Our RAS pathway signature score was calculated in the Mayo Ovarian FFPE tumor dataset. The dataset was stratified by histological type of tumor. The box plot shows the distribution of the RAS pathway signatures cores among subtypes.

[0017] FIG. 9 shows that the inventive RAS pathway signature score is high in adenocarcinomas and low in squamous non-small cell lung carcinoma (NSCLC). Our RAS pathway signature score was calculated in a dataset of fresh frozen lung tumor samples. The box plot shows the distributions of RAS scores for adenocarcinomas and squamous cell carcinomas. The difference between these two groups is significant at 0.05 level by both t-test and wilcoxon rank sum test. Virtually all squamous cell carcinomas had negative RAS pathway signature scores, whereas 70% of adenocarcinomas had positive RAS pathway signature scores.

[0018] FIG. 10 shows a pie-chart of GFS/RAS expression in triple negative tumors. Only about half of “triple negative” breast tumors have high RAS scores. RAS signature was scored in “triple negative” and Her2+ fresh frozen breast tumors.

[0019] FIG. 11 shows the distribution of RAS pathway signature scores across eleven tumor types.

[0020] FIG. 12 shows that K-RAS siRNA knockdown suggests that RAS pathway signature score is more predictive of RAS dependence than K-ras mutational status.

[0021] FIG. 13 show that a high baseline RAS signature score predicts resistance to AKT inhibitor (AKTi) MK-6673, in a breast cancer cell line. Resistant cell lines are defined as those with percent inhibition <60% and sensitive as those with percent inhibition >60% (p-value by Fisher Exact test <0.002).

[0022] FIG. 14 shows the generation of breast cancer cell lines with acquired resistance to AKTi MK-2206. Top left panel: to generate cell liens with acquired AKTi resistance, we cultured two PTEN mutant breast cancer lines in increasing concentrations of MK-2206 for a period of ˜7 months initially at a low concentration (20 nM) of inhibitor. To control for the possibility that resistance could be acquired by genetic drift over multiple passages in culture, we also grew control flasks of each breast cancer cell line in the presence of DMSO vehicle for the course of the experiment Inhibitor concentration was increased by 5-10 nM when the growth rate of the cells reached the level of vehicle controls. Top right panel: Resulting cell populations that could be grown in high concentrations of MK-2206 (>2 μM) were removed from drug and then tested for resistance to MK-2206 in growth assay. Parental (triangles) and resistance (squares) ZR-75-1 cells were treated with MK-2206 at the indicated concentrations and cell viability was measured 72 hours after treatment by Alamar Blue assay. The percentage of viable cells is shown relative to untreated controls. Similar data were obtained for CAMA-1 cells. Bottom panel: Analysis of RAS pathway signature in CAMA-1R and ZR-75-1R cells. To assess whether deregulation of the RAS pathway could account for the resistance phenotype, the AKTi resistance signatures for each cell line were compared to the RAS pathway signature. The table in the bottom panel shows that the RAS pathway is significantly modified in cell lines with acquired AKT resistance.

[0023] FIG. 15 shows that RAS signature score correlates with MEK inhibitor (MEKi) sensitivity in chronic beryllium disease (CBD) lung samples.

[0024] FIG. 16 shows that RAS signature score correlates with MEKi sensitivity in CBD-Lung cell lines having mutant RAS.

[0025] FIG. 17 shows that RAS signature score correlates with MEKi sensitivity in CBD-Lung cell lines having wild-type RAS.

[0026] FIG. 18 shows that the RAS pathway signature score is down regulated by MEKi AZD6244 in vivo at 4 hours post-dose but not at 24 hours post-dose, consistent with AZD's short half-life in vivo.

[0027] FIG. 19 shows that the blood concentration of AZD6244 in mice peaks about 2 hours post-dose and decreases rapidly thereafter.

### 3. DETAILED DESCRIPTION OF THE INVENTION

[0028] This section presents a detailed description of the many different aspects and embodiments that are representative of the inventions disclosed herein. This description is by way of several exemplary illustrations, of varying detail and specificity. Other features and advantages of these embodiments are apparent from the additional descriptions provided herein, including the different examples. The provided examples illustrate different components and methodology useful in practicing various embodiments of the invention. The examples are not intended to limit the claimed invention. Based on the present disclosure the ordinary skilled artisan can identify and employ other components and methodology useful for practicing the present invention.

### 3.1 Introduction

[0029] Various embodiments of the invention relate to sets of genetic biomarkers whose expression patterns correlate with an important characteristic of cancer cells, i.e., deregulation of the RAS signaling pathway. In some embodiments, these sets of biomarkers may be split into two opposing “arms” —the “up” arm (Table 2a), which are the genes that are upregulated, and the “down” arm (Table 2b), which are the genes that are downregulated, as signaling through the RAS pathway increases. More specifically, some aspects of the invention provide for sets of genetic biomarkers whose expression correlates with the regulation status of the RAS signaling pathway of a tumor cell sample of a patient, and which can be used to classify tumors with deregulated RAS signaling pathway from tumors with regulated RAS signaling pathway. RAS signaling pathway regulation status is a useful indicator of the likelihood that a patient will respond to certain therapies, such as inhibitors of the RAS signaling pathway, or likelihood that a patient will be resistant to certain therapies, such as EGFR or PI3K pathway inhibitors. Such therapies include, but are not limited to: PI3K inhibitors LY249002, wortmannin, and PX-866; AKT inhibitors 17-AAG, PX316, miltefosine, and perifosin; EGFR inhibitors ZD1839; IMC-C225; ERBB2 inhibitor Herceptin; RAS inhibitors ISIS 2503 and farnesyl transferase inhibitor R115777, L731735, SCH 66336, and BMS214662; Raf inhibitors ISIS 5132 and BAY43-9006; MEK inhibitors PD184322 and CI-1040 (reviewed in Henson and Gibson 2006, Cellular Signalling 18:2089-2097; Hennessy et al., 2005, Nat. Rev. Drug Disc. 4:988-1004; reviewed in Dancey, 2002, Curr. Pharm. Des. 8:2259-2267; Sebolt-Leopold et al., 1999, Nat. Med. 5:810-816; Downward, 2003, Nat. Rev. Cancer 3:11-22). In one aspect of the invention, methods are provided for use of these biomarkers to distinguish between patient groups that will likely respond to inhibitors of the RAS signaling pathway (predicted responders) and patient groups that will not likely respond to inhibitors of the RAS pathway signaling pathway (predicted non-responders) and to determine general courses of treatment. In another aspect of the invention, methods are provided for use of these biomarkers to distinguish between patient groups that will not likely respond to inhibitors of the PI3K signaling pathway or EGFR inhibitors (predicted non-responders) and patient groups that will likely respond to inhibitors of the PI3K signaling pathway or EGFR inhibitors. Another aspect of the invention relates to biomarkers whose expression correlates with a pharmacodynamic effect of a therapeutic agent on the RAS signaling pathway in subject with cancer. In yet other aspects of the invention, methods are provided for use of these biomarkers to measure the pharmacodynamic effect of a therapeutic agent on the RAS signaling pathway in a subject with cancer and the use of these biomarkers to rank the efficacy of therapeutic agents to modulate the RAS signaling pathway. Microarrays comprising these biomarkers are also provided, as well as methods of contructing such microarrays. Each of the biomarkers correspond to a gene in the human genome, i.e., such biomarker is identifiable as all or a portion of a gene. Finally, because each of the above biomarkers correlate with cancer-related conditions, the biomarkers, or the proteins they encode, are likely to be targets for drugs against cancer.

### 3.2 DEFINITIONS

[0030] Unless defined otherwise, all technical and scientific terms used herein have the same meaning as commonly understood to one of ordinary skill in the art to which this invention belongs.

[0031] As used herein, oligonucleotide sequences that are complementary to one or more of the genes described herein, refers to oligonucleotides that are capable of hybridizing under stringent conditions to at least part of the nucleotide sequence of said genes. Such hybridizable oligonucleotides will typically exhibit at least about 75% sequence identity at the nucleotide level to said genes, preferably about 80% or 85% sequence identity or more preferably about 90% or 95% or more sequence identity to said genes.

[0032] “Bind(s) substantially” refers to complementary hybridization between a probe nucleic acid and a target nucleic acid and embraces minor mismatches that can be accommodated by reducing the stringency of the hybridization media to achieve the desired detection of the target polynucleotide sequence.

[0033] The phrase “hybridizing specifically to” refers to the binding, duplexing or hybridizing of a molecule substantially to or only to a particular nucleotide sequence or sequences under stringent conditions when that sequence is present in a complex mixture (e.g., total cellular) DNA or RNA.

[0034] “Biomarker” means any gene, protein, or an EST derived from that gene, the expression or level of which changes between certain conditions. Where the expression of the gene correlates with a certain condition, the gene is a biomarker for that condition.

[0035] “Biomarker-derived polynucleotides” means the RNA transcribed from a biomarker gene, any cDNA or cRNA produced therefrom, and any nucleic acid derived therefrom, such as synthetic nucleic acid having a sequence derived from the gene corresponding to the biomarker gene.

[0036] A gene marker is “informative” for a condition, phenotype, genotype or clinical characteristic if the expression of the gene marker is correlated or anti-correlated with the condition, phenotype, genotype or clinical characteristic to a greater degree than would be expected by chance.

[0037] As used herein, the term “gene” has its meaning as understood in the art. However, it will be appreciated by those of ordinary skill in the art that the term “gene” may include gene regulatory sequences (e.g., promoters, enhancers, etc.) and/or intron sequences. It will further be appreciated that definitions of gene include references to nucleic acids that do not encode proteins but rather encode functional RNA molecules such as tRNAs. For clarity, the term gene generally refers to a portion of a nucleic acid that encodes a protein; the term may optionally encompass regulatory sequences. This definition is not intended to exclude application of the term “gene” to non-protein coding expression units but rather to clarify that, in most cases, the term as used in this document refers to a protein coding nucleic acid. In some cases, the gene includes regulatory sequences involved in transcription, or message production or composition. In other embodiments, the gene comprises transcribed sequences that encode for a protein, polypeptide or peptide. In keeping with the terminology described herein, an “isolated gene” may comprise transcribed nucleic acid(s), regulatory sequences, coding sequences, or the like, isolated substantially away from other such sequences, such as other naturally occurring genes, regulatory sequences, polypeptide or peptide encoding sequences, etc. In this respect, the term “gene” is used for simplicity to refer to a nucleic acid comprising a nucleotide sequence that is transcribed, and the complement thereof. In particular embodiments, the transcribed nucleotide sequence comprises at least one functional protein, polypeptide and/or peptide encoding unit. As will be understood by those in the art, this functional term “gene” includes both genomic sequences, RNA or cDNA sequences, or smaller engineered nucleic acid segments, including nucleic acid segments of a non-transcribed part of a gene, including but not limited to the non-transcribed promoter or enhancer regions of a gene. Smaller engineered gene nucleic acid segments may express, or may be adapted to express using nucleic acid manipulation technology, proteins, polypeptides, domains, peptides, fusion proteins, mutants and/or such like. The sequences which are located 5′ of the coding region and which are present on the mRNA are referred to as 5′ untranslated sequences (“5′UTR”). The sequences which are located 3′ or downstream of the coding region and which are present on the mRNA are referred to as 3′ untranslated sequences, or (“3′UTR”).

[0038] “Signature” refers to the differential expression pattern. It could be expressed as the number of individual unique probes whose expression is detected when a cRNA product is used in microarray analysis. A signature may be exemplified by a particular set of biomarkers.

[0039] A “similarity value” is a number that represents the degree of similarity between two things being compared. For example, a similarity value may be a number that indicates the overall similarity between a cell sample expression profile using specific phenotype-related biomarkers and a control specific to that template (for instance, the similarity to a “deregulated RAS signaling pathway” template, where the phenotype is deregulated RAS signaling pathway status). The similarity value may be expressed as a similarity metric, such as a correlation coefficient, or may simply be expressed as the expression level difference, or the aggregate of the expression level differences, between a cell sample expression profile and a baseline template.

[0040] As used herein, the terms “measuring expression levels,” “obtaining expression level,” and “detecting an expression level” and the like, includes methods that quantify a gene expression level of, for example, a transcript of a gene, or a protein encoded by a gene, as well as methods that determine whether a gene of interest is expressed at all. Thus, an assay which provides a “yes” or “no” result without necessarily providing quantification, of an amount of expression is an assay that “measures expression” as that term is used herein. Alternatively, a measured or obtained expression level may be expressed as any quantitative value, for example, a fold-change in expression, up or down, relative to a control gene or relative to the same gene in another sample, or a log ratio of expression, or any visual representation thereof, such as, for example, a “heatmap” where a color intensity is representative of the amount of gene expression detected. The genes identified as being differentially expressed in tumor cells having RAS signaling pathway deregulation may be used in a variety of nucleic acid or protein detection assays to detect or quantify the expression level of a gene or multiple genes in a given sample. Exemplary methods for detecting the level of expression of a gene include, but are not limited to, Northern blotting, dot or slot blots, reporter gene matrix (see for example, U.S. Pat. No. 5,569,588) nuclease protection, RT-PCR, microarray profiling, differential display, 2D gel electrophoresis, SELDI-TOF, ICAT, enzyme assay, antibody assay, and the like.

[0041] A “patient” can mean either a human or non-human animal, preferably a mammal

[0042] As used herein, “subject”, as refers to an organism or to a cell sample, tissue sample or organ sample derived therefrom, including, for example, cultured cell lines, biopsy, blood sample, or fluid sample containing a cell. In many instances, the subject or sample derived therefrom, comprises a plurality of cell types. In one embodiment, the sample includes, for example, a mixture of tumor and normal cells. In one embodiment, the sample comprises at least 10%, 15%, 20%, et seq., 90%, or 95% tumor cells. The organism may be an animal, including but not limited to, an animal, such as a cow, a pig, a mouse, a rat, a chicken, a cat, a dog, etc., and is usually a mammal, such as a human.

[0043] As used herein, the term “pathway” is intended to mean a set of system components involved in two or more sequential molecular interactions that result in the production of a product or activity. A pathway can produce a variety of products or activities that can include, for example, intermolecular interactions, changes in expression of a nucleic acid or polypeptide, the formation or dissociation of a complex between two or more molecules, accumulation or destruction of a metabolic product, activation or deactivation of an enzyme or binding activity. Thus, the term “pathway” includes a variety of pathway types, such as, for example, a biochemical pathway, a gene expression pathway, and a regulatory pathway. Similarly, a pathway can include a combination of these exemplary pathway types.

[0044] “RAS signaling pathway” or “RAS pathway” is initiated by growth factors through receptor tyrosine kinases. The autophosphorylated receptor binds to the SH2 domain of GRB2. Through its SH3 domain, GRB2 is bound to SOS, so activation of the receptor tyrosine kinase results in recruitment of SOS to the plasma membrane, where RAS is also localized as a result of farnesylation. The increased proximity of SOS to RAS results in increased nucleotide exchange on RAS, with GDP being replaced with GTP. GTP-bound RAS is able to bind and activate several families of effector enzymes (such as the RAF, PI3K, RALGDS, and PLCε pathways)(reviewed in Downward, 2003, Nat. Rev. Cancer 3:11-22)(See FIG. 1). This signaling cascade affects multiple cellular processes, such as cell-cycle progression, transcription, survival, cytoskeletal signals, translation, vesicle transport, and calcium signaling, and results in a gene expression “signature” of pathway activity.

TABLE 1
Representative RAS pathway genes

| Gene Name | Transcript ID |
|---|---|
| CDH13 | NM_001257 |
| RASGRP1 | NM_005739 |
| FAM13A1 | NM_014883 |
| G3BP1 | NM_005754 |
| RASGRP2 | NM_153819 |
| CNKSR1 | NM_006314 |
| NET1 | NM_001047160 |
| PAK4 | NM_005884 |
| DLC1 | NM_182643 |
| CDC42EP2 | NM_006779 |
| VAV3 | NM_006113 |
| ARFGEF2 | NM_006420 |
| RABAC1 | NM_006423 |
| GNA13 | NM_006572 |
| CFL1 | NM_005507 |
| GRAP | NM_006613 |
| CYSLTR1 | NM_006639 |
| FRS3 | NM_006653 |
| UTS2 | NM_021995 |
| RALBP1 | NM_006788 |
| ADAP1 | NM_006869 |
| CDC42EP1 | NM_007061 |
| RASSF1 | NM_007182 |
| NISCH | NM_007184 |
| AKAP13 | NM_006738 |
| CHRM4 | NM_000741 |
| GPRIN1 | NM_052899 |
| FMNL2 | NM_052905 |
| SNX26 | NM_052948 |
| EVI5L | NM_145245 |
| RASGRP4 | NM_170604 |
| SLC26A8 | NM_052961 |
| RAB39B | NM_171998 |
| ARAP2 | NM_015230 |
| ARAP1 | NM_001040118 |
| AGAP2 | NM_014770 |
| AGAP1 | NM_001037131 |
| AGAP3 | NM_031946 |
| TAGAP | NM_054114 |
| FGD4 | NM_139241 |
| CCR1 | NM_001295 |
| CNN1 | NM_001299 |
| IQGAP3 | NM_178229 |
| TBC1D20 | NM_144628 |
| GAB4 | NM_001037814 |
| ABRA | NM_139166 |
| CRKL | NM_005207 |
| ADORA3 | NM_001081976 |
| MAPK14 | NM_001315 |
| SESN3 | NM_144665 |
| CSK | NM_004383 |
| RTN4RL1 | NM_178568 |
| CDC42EP5 | NM_145057 |
| DIRAS1 | NM_145173 |
| ADRA2A | NM_000681 |
| CTNND2 | NM_001332 |
| ROPN1B | NM_001012337 |
| FGD5 | NM_152536 |
| SH3D19 | NM_001009555 |
| ADRB2 | NM_000024 |
| AMOT | NM_133265 |
| ADRB3 | NM_000025 |
| RP13-102H20.1 | NM_144967 |
| DAB2 | NM_001343 |
| SPRED1 | NM_152594 |
| DENND2C | NM_198459 |
| RHOV | NM_133639 |
| DMPK | NM_004409 |
| DOCK2 | NM_004946 |
| DOK1 | NM_001381 |
| DYRK1A | NM_101395 |
| ECT2 | NM_018098 |
| ABCA1 | NM_005502 |
| EDN1 | NM_001955 |
| EFNB1 | NM_004429 |
| EFNB3 | NM_001406 |
| SPRED2 | NM_181784 |
| MUC20 | NM_152673 |
| ARHGAP27 | NM_199282 |
| EPHB2 | NM_004442 |
| EPHB6 | NM_004445 |
| EPO | NM_000799 |
| F2R | NM_001992 |
| F7 | NM_019616 |
| RTKN2 | NM_145307 |
| RASGEF1A | NM_145313 |
| SPATA13 | NM_153023 |
| FGD2 | NM_173558 |
| FGD1 | NM_004463 |
| FGF2 | NM_002006 |
| RRAS2 | NM_012250 |
| MRAS | NM_012219 |
| RASA3 | NM_007368 |
| RHOBTB3 | NM_014899 |
| CNKSR2 | NM_014927 |
| DAAM1 | NM_014992 |
| FOXJ1 | NM_001454 |
| RGL1 | NM_015149 |
| FLT1 | NM_002019 |
| FLT3 | NM_004119 |
| ARHGEF9 | NM_015185 |
| MCF2L | NM_001112732 |
| FBXW11 | NM_033645 |
| ARHGEF12 | NM_015313 |
| PPP1R13B | NM_015316 |
| ARHGEF18 | NM_015318 |
| SRGAP2 | NM_015326 |
| FNTA | NM_001018677 |
| DAAM2 | NM_015345 |
| CDC42EP4 | NM_012121 |
| SH3BP1 | NM_018957 |
| NUP62 | NM_012346 |
| PLXNB2 | NM_012401 |
| SMPX | NM_014332 |
| ARHGAP30 | NM_181720 |
| SHC2 | NM_012435 |
| RASGRP3 | NM_170672 |
| FBXO8 | NM_012180 |
| ARFGAP3 | NM_014570 |
| GFRA1 | NM_005264 |
| LAT | NM_001014989 |
| DENND2A | NM_015689 |
| RND1 | NM_014470 |
| SGSM3 | NM_015705 |
| GNA11 | NM_002067 |
| GNA12 | NM_007353 |
| GNA15 | NM_002068 |
| GNB1 | NM_002074 |
| GPR4 | NM_005282 |
| RASSF3 | NM_178169 |
| KSR2 | NM_173598 |
| GRB2 | NM_203506 |
| GIT1 | NM_014030 |
| DBNL | NM_014063 |
| ABR | NM_021962 |
| GRPR | NM_005314 |
| GPR132 | NM_013345 |
| RHOD | NM_014578 |
| HGF | NM_000601 |
| TAX1BP3 | NM_014604 |
| HRAS | NM_176795 |
| AGFG1 | NM_004504 |
| APOA1 | NM_000039 |
| HTR2C | NM_000868 |
| C20orf95 | ENST00000243967 |
| APOC3 | NM_000040 |
| IGF1 | NM_000618 |
| APOE | NM_000041 |
| RTN4RL2 | NM_178570 |
| CXCL10 | NM_001565 |
| INPPL1 | NM_001567 |
| AQP9 | NM_020980 |
| KCNH2 | NM_000238 |
| KISS1 | NM_002256 |
| ARF6 | NM_001663 |
| KRAS | NM_004985 |
| RHOA | NM_001664 |
| RASL11A | NM_206827 |
| RHOB | NM_004040 |
| RND3 | NM_005168 |
| RHOG | NM_001665 |
| ARHGAP1 | NM_004308 |
| STMN1 | NM_203399 |
| ARHGAP4 | NM_001666 |
| LCK | NM_005356 |
| ARHGAP5 | NM_001173 |
| ARHGAP6 | NM_001174 |
| LGALS3 | NM_002306 |
| ARHGDIA | NM_004309 |
| LGALS8 | NM_201545 |
| ARHGDIB | NM_001175 |
| ARHGDIG | NM_001176 |
| LIMK1 | NM_002314 |
| LIMK2 | NM_005569 |
| RHOH | NM_004310 |
| SPRED3 | NM_001042522 |
| SHC4 | NM_203349 |
| LTK | NM_206961 |
| MAP1LC3C | NM_001004343 |
| MYO9B | NM_004145 |
| MYOC | NM_000261 |
| NEK3 | NM_002498 |
| NF1 | NM_000267 |
| NGF | NM_002506 |
| NOTCH2 | NM_024408 |
| NRAS | NM_002524 |
| NTRK1 | NM_001007792 |
| NTSR1 | NM_002531 |
| OPHN1 | NM_002547 |
| P2RX7 | NM_002562 |
| P2RY2 | NM_002564 |
| PAFAH1B1 | NM_000430 |
| PAK1 | NM_002576 |
| DEF6 | NM_022047 |
| PAK3 | NM_002578 |
| ARHGEF4 | NM_015320 |
| ARHGEF3 | NM_019555 |
| PARD6A | NM_001037281 |
| STMN3 | NM_015894 |
| ZDHHC9 | NM_016032 |
| PLCE1 | NM_016341 |
| TBC1D7 | NM_016495 |
| PTPLAD1 | NM_016395 |
| ENPP2 | NM_006209 |
| RAPGEF6 | NM_016340 |
| SERPINF1 | NM_002615 |
| PIN1 | NM_006221 |
| PITX1 | NM_002653 |
| PKD3 | NM_005813 |
| SHC3 | NM_016848 |
| PLD1 | NM_002662 |
| PLEK | NM_002664 |
| PLXNB1 | NM_002673 |
| RIN2 | NM_018993 |
| RHOF | NM_019034 |
| WDR44 | NM_019045 |
| DIRAS2 | NM_017594 |
| RASIP1 | NM_017805 |
| RALGPS2 | NM_152663 |
| ARHGAP17 | NM_001006634 |
| FAIM | NM_001033031 |
| PLEKHG6 | NM_018173 |
| SYNJ2BP | NM_018373 |
| ARFGAP1 | NM_018209 |
| FGD6 | NM_018351 |
| ARHGAP15 | NM_018460 |
| C3orf10 | NM_018462 |
| MAPK1 | NM_002745 |
| MAPK3 | NM_002746 |
| MAPK11 | NM_002751 |
| MAPK13 | NM_002754 |
| MAP2K1 | NM_002755 |
| MAP2K2 | NM_030662 |
| PRLR | NM_000949 |
| PARD3 | NM_019619 |
| LTB4R2 | NM_019839 |
| PSD | NM_002779 |
| GRIPAP1 | NM_020137 |
| CIAPIN1 | NM_020313 |
| RAB25 | NM_020387 |
| RGL3 | NM_001035223 |
| RHOJ | NM_020663 |
| SRGAP1 | NM_020762 |
| PTK6 | NM_005975 |
| ARHGAP20 | NM_020809 |
| PREX1 | NM_020820 |
| ARHGAP21 | NM_020824 |
| RANBP10 | NM_020850 |
| ARHGAP23 | ENST00000300901 |
| ALS2 | NM_020919 |
| RAP2C | NM_021183 |
| PTPRK | NM_002844 |
| RHOU | NM_021205 |
| ARHGAP22 | NM_021226 |
| RGL2 | NM_004761 |
| RAC1 | NM_006908 |
| RAC3 | NM_005052 |
| RAF1 | NM_002880 |
| RALA | NM_005402 |
| RALB | NM_002881 |
| RALGDS | NM_001042368 |
| RAP1A | NM_001010935 |
| RAP2A | NM_021033 |
| RASA2 | NM_006506 |
| RASGRF1 | NM_002891 |
| RASGRF2 | NM_006909 |
| BCL6 | NM_001706 |
| ROCK1 | NM_005406 |
| BCR | NM_004327 |
| RRAS | NM_006270 |
| RREB1 | NM_001003699 |
| RTKN | NM_001015055 |
| RSU1 | NM_012425 |
| MAPK12 | NM_002969 |
| SDCBP | NM_005625 |
| SEMA4A | NM_022367 |
| ARHGAP9 | NM_032496 |
| ARAP3 | NM_022481 |
| ITSN1 | NM_003024 |
| SH3GL1 | NM_003025 |
| SHC1 | NM_003029 |
| SMAP2 | NM_022733 |
| EPS8L2 | NM_022772 |
| PLEKHG2 | NM_022835 |
| SLC26A10 | NM_133489 |
| SOS1 | NM_005633 |
| SOS2 | NM_006939 |
| SRC | NM_005417 |
| ST5 | NM_005418 |
| TAC1 | NM_013998 |
| TACR1 | NM_001058 |
| BTK | NM_000061 |
| TIAM1 | NM_003253 |
| C3AR1 | NM_004054 |
| TRIO | NM_007118 |
| TSC1 | NM_000368 |
| TTN | NM_133432 |
| WNT7A | NM_004625 |
| FMNL1 | NM_005892 |
| YWHAB | NM_139323 |
| CXCR4 | NM_003467 |
| MAPKAPK3 | NM_004635 |
| ARHGAP10 | NM_024605 |
| ELMO3 | NM_024712 |
| ARHGAP28 | NM_001010000 |
| ARHGEF5 | NM_005435 |
| RIN3 | NM_024832 |
| NUP85 | NM_024844 |
| DOCK5 | NM_024940 |
| SHOC2 | NM_007373 |
| MAP1LC3B | NM_022818 |
| SPRY4 | NM_030964 |
| ARHGAP24 | NM_001025616 |
| RASSF5 | NM_182663 |
| RASSF4 | NM_032023 |
| OBSCN | NM_001098623 |
| ANKRD27 | NM_032139 |
| ULK1 | NM_003565 |
| SYDE2 | NM_032184 |
| ARFGAP2 | NM_032389 |
| RASAL1 | NM_004658 |
| MAP1LC3A | NM_181509 |
| PARD6B | NM_032521 |
| GPR65 | NM_003608 |
| SPRYD3 | NM_032840 |
| ARHGAP19 | NM_032900 |
| RERG | NM_032918 |
| SYDE1 | NM_033025 |
| DOCK7 | NM_033407 |
| SCIN | NM_001112706 |
| RFXANK | NM_003721 |
| GBF1 | NM_004193 |
| IQGAP1 | NM_003870 |
| WISP1 | NM_003882 |
| KSR1 | NM_014238 |
| ARHGAP11B | NM_001039841 |
| FGD3 | NM_001083536 |
| KALRN | NM_001024660 |
| F2RL3 | NM_003950 |
| DOK2 | NM_003974 |
| PRC1 | NM_199414 |
| USP6 | NM_004505 |
| FMNL3 | NM_198900 |
| MAPKAPK2 | NM_004759 |
| CYTH3 | NM_004227 |
| CYTH1 | NM_004762 |
| GPR55 | NM_005683 |
| ARHGAP18 | NM_033515 |
| GRAP2 | NM_004810 |
| ARHGAP29 | NM_004815 |
| SYTL5 | NM_138780 |
| ARHGAP12 | NM_018287 |
| BAG3 | NM_004281 |
| CD44 | NM_001001390 |
| RIN1 | NM_004292 |
| TRAF4 | NM_004295 |
| GNA14 | NM_004297 |
| RAPGEF2 | NM_014247 |
| NOS1AP | NM_014697 |
| DOCK4 | NM_014705 |
| STARD8 | NM_014725 |
| GIT2 | NM_057170 |
| ARHGAP11A | NM_014783 |
| ARHGEF11 | NM_014784 |
| ELMO1 | NM_014800 |
| FARP2 | NM_014808 |
| SRGAP3 | NM_014850 |
| G3BP2 | NM_203504 |
| MFN2 | NM_014874 |
| ARHGAP25 | NM_001007231 |
| CDC42 | NM_001039802 |

[0045] Unless otherwise indicated, “RAS pathway signature” or “RAS pathway signature score” refers to or is based on, respectively, the 147 biomarkers presented in Tables 2a and 2b, or subsets of these biomarkers.

[0046] “RAS pathway agent” refers to an agent that modulates signaling through the RAS pathway. A RAS pathway inhibitor inhibits signaling through the RAS pathway. Molecular targets of such agents include, but are not limited to: RAS, RAF, MEK, MAPK, ELK1, and the genes listed in the Table 1. Such agents are well known in the art and include, but are not limited to: RAS inhibitors ISIS 2503 and farnesyl transferase inhibitor R115777, L731735, SCH 66336, and BMS214662; Raf inhibitors ISIS 5132 and BAY43-9006; MEK inhibitors PD184322 and CI-1040 (reviewed in Dancey, 2002, Curr. Pharm. Des. 8:2259-2267; Sebolt-Leopold et al., 1999, Nat. Med. 5:810-816; Downward, 2003, Nat. Rev. Cancer 3:11-22).

[0047] “Growth factor signaling pathway” is initiated by binding of growth factors (including, but not limited to, heregulin, insulin, IGF, FGF, EGF) to receptor tyrosine kinases (including, but not limited to the ERBB family of receptors). The binding of a growth factor to its corresponding receptor leads to receptor dimerization, phosphorylation of key tyrosine residues, and recruitment of several proteins at the intracellular portion of the receptor. These proteins then initiate intracellular signaling via several pathways, such as PI3K/AKT, RAS/ERK, and JAK/STAT signaling pathways, leading to the activation of anti-apoptotic proteins and the inactivation of pro-apoptotic proteins (reviewed in Henson and Gibson, 2006, Cellular Signaling 18:2089-2097). In this application, unless otherwise specified, it will be understood that “growth factor signaling pathway” refers to signaling through PI3K/AKT signaling pathway, initiated by the binding of an external growth factor to a membrane tyrosine kinase receptor.

[0048] “PI3K signaling pathway,” also known as the “PI3K/AKT signaling pathway” or “AKT signaling pathway” refers to one of the intracellular signaling pathways activated by the binding of growth factors to receptor tyrosine kinases. On activation, PI3K phosphorylates phosphatidylinositol-4,5-bisphosphate (PIP2) to phsophatidylinosito1-3,4,5-triphosphate (PIP3), a process that is reversed by PTEN. PIP3 signals activate the kinase PDK1, which in turn activates the kinase AKT. See also PCT application, “Methods and Gene Expression Signature for Assessing Growth Factor Signaling Pathway Regulation Status,” by James Watters et al., filed on Mar. 19, 2009, for an illustration and description of the PI3K signaling pathway. In addition, see Hennessy et al., 2005, Nat. Rev. Drug Discov. 4:988-1004 for a review of the PI3K/AKT signaling cascade).

[0049] “Growth factor pathway agent” or “PI3K agent” refers to an agent which modulates growth factor pathway signaling through the PI3K/AKT signaling arm. A growth factor pathway or PI3K inhibitor inhibits growth factor pathway signaling through the PI3K/AKT signaling arm. Molecular targets of such inhibitors may include PI3K, AKT, mTOR, PDK1, MYC, cMET, FGFR2, growth factors (EGF, b-FGF, IGF1, Insulin, or Heregulin) and their corresponding receptors. Such agents are well known in the art and include, but are not limited to: phosphatidylinositol ether lipid analogs, alkylphospholipid analogs, allosteric AKT inhibitors, HSP90 inhibitor, alkylphospholipid perifosine, rapamycin, RAD001, FTY720, PDK1 inhibitors (BX-795, BX-912, and BX-320 (Feldman et al., 2005, J. Biol. Chem. 280:19867-19874); 7-hydroxystaurosporine (Sato et al., 2002, Oncogene, 21:1727-1738)); PI3K inhibitors, such as wortmannin (Wymann et al., 1996, Mol. Cell. Biol. 16:1722-1733); LY294002 (Vlahos et al., 1994, J. Biol. Chem. 269:5241-5248; Wetzker and Rommel, 2004, Curr. Pharm. Des. 10:1915-1922); IC87114 (Finan and Thomas, 2004, Biochem. Soc. Trans. 32:378-382; WO0181346); WO01372557; U.S. Pat. No. 6,403,588; WO0143266); AKT antibodies (Shin et al., 2005, Cancer Res. 65:2815-2824) (see also Cheng et al., Oncogene, 2005, 24:7482-7492 for review on inhibitors of AKT pathway), and IGF1R inhibitors (such as monoclonal antibody MK-0646 U.S. Pat. No. 7,241,444). The inhibitors and agents listed in the PCT application, “Methods and Gene Expression Signature for Assessing Growth Factor Signaling Pathway Regulation Status,” by James Watters et al., filed on Mar. 19, 2009, that were used to identify and refine the growth factor signaling pathway biomarkers are also exemplary growth factor pathway agents (i.e., AKT1/2 inhibitors L-001154547 ('547; 3-phenyl-2-(4-{[4-(5-pyridin-2-yl-1H-1,2,4-triazol-3-yl)piperidin-1-yl]methyl}phenyl)-1,6-naphthyridin-5(6H)-one; disclosed in WO2006065601), L-01173931 ('931; 6-Methyl-3-phenyl-2-(4-1[4-(5-pyridin-2-yl-1H-1,2,4-triazol-3-yl)piperidin-1-yl]methyl}phenyl)-1,6-naphthyridin-5(6H)-one; disclosed in WO2006065601; gamma secretase inhibitor 421B (U.S. Pat. No. 7,138,400 and WO02/36555); cMET inhibitors L-001501404 (4-(6-Phenyl-[1,2,4]triazolo[4,3-b][1,2,4]triazin-3-ylmethyl)-phenol, see also U.S. Pat. No. 7,122,548), MK-2461 (N-[(2R)-1,4-dioxan-2-ylmethy1]-N-methyl-N-[3-(1-methyl-1H-pyrazol-4-yl)-5-oxo-5H-benzo[4,5]cyclohepta[1,2-b]pyridin-7-yl]sulfamide), and L-001793225 (143-(1-Methyl-1H-pyrazol-4-yl)-5-oxo-5H-benzo[4,5]cyclohepta[1,2-b]pyridin-7-yl]-N-(pyridin-2-ylmethyl)methanesulfonamide.

[0050] The term “deregulated signaling pathway” is used herein to mean that the signaling pathway is either hyperactivated or hypoactivated. A RAS signaling pathway is hyperactivated in a sample (for example, a tumor sample) if it has at least 10%, 20%, 50%, 75%, 100%, 200%, 500%, 1000% greater activity/signaling than the RAS signaling pathway in a normal (regulated) sample. A RAS signaling pathway is hypoactivated if it has at least 10%, 20%, 50%, 75%, 100% less activity/signaling in a sample (for example, a tumor sample) than the RAS signaling pathway in a normal (regulated) sample. The normal sample with the regulated RAS signaling pathway may be from adjacent normal tissue or may be other tumor samples which do not have deregulated RAS signaling. Alternatively, comparison of samples RAS signaling pathway status may be done with identical samples which have been treated with a drug or agent vs. vehicle. The change in activation or regulation status may be due to a mutation of one or more genes in the RAS signaling pathway (such as point mutations, deletion, or amplification), changes in transcriptional regulation (such as methylation, phosphorylation, or acetylation changes), or changes in protein regulation (such as translation or post-translational control mechanisms).

[0051] The term “oncogenic pathway” is used herein to mean a pathway that when hyperactivated or hypoactivated contributes to cancer initiation or progression. In one embodiment, an oncogenic pathway is one that contains an oncogene or a tumor suppressor gene.

[0052] The term “treating” in its various grammatical forms in relation to the present invention refers to preventing (i.e., chemoprevention), curing, reversing, attenuating, alleviating, minimizing, suppressing, or halting the deleterious effects of a disease state, disease progression, disease causative agent (e.g., bacteria or viruses), or other abnormal condition. For example, treatment may involve alleviating a symptom (i.e., not necessarily all the symptoms) of a disease of attenuating the progression of a disease.

[0053] “Treatment of cancer,” as used herein, refers to partially or totally inhibiting, delaying, or preventing the progression of cancer including cancer metastasis; inhibiting, delaying, or preventing the recurrence of cancer including cancer metastasis; or preventing the onset or development of cancer (chemoprevention) in a mammal, for example, a human. In addition, the methods of the present invention may be practiced for the treatment of human patients with cancer. However, it is also likely that the methods would also be effective in the treatment of cancer in other mammals.

[0054] As used herein, the term “therapeutically effective amount” is intended to qualify the amount of the treatment in a therapeutic regiment necessary to treat cancer. This includes combination therapy involving the use of multiple therapeutic agents, such as a combined amount of a first and second treatment where the combined amount will achieve the desired biological response. The desired biological response is partial or total inhibition, delay, or prevention of the progression of cancer including cancer metastasis; inhibition, delay, or prevention of the recurrence of cancer including cancer metastasis; or the prevention of the onset of development of cancer (chemoprevention) in a mammal, for example, a human.

[0055] “Displaying or outputting a classification result, prediction result, or efficacy result” means that the results of a gene expression based sample classification or prediction are communicated to a user using any medium, such as for example, orally, writing, visual display, etc., computer readable medium or computer system. It will be clear to one skilled in the art that outputting the result is not limited to outputting to a user or a linked external component(s), such as a computer system or computer memory, but may alternatively or additionally be outputting to internal components, such as any computer readable medium. Computer readable media may include, but are not limited to hard drives, floppy disks, CD-ROMs, DVDs, DATs. Computer readable media does not include carrier waves or other wave forms for data transmission. It will be clear to one skilled in the art that the various sample classification methods disclosed and claimed herein, can, but need not be, computer-implemented, and that, for example, the displaying or outputting step can be done by, for example, by communicating to a person orally or in writing (e.g., in handwriting).

### 3.3 BIOMARKERS USERFUL IN CLASSIFYING TUMORS AND PREDICTING RESPONSE TO THERAPEUTIC AGENTS

### 3.3.1 Biomarker Sets

[0056] One aspect of the invention provides a set of 147 biomarkers whose expression is correlated with RAS signaling pathway deregulation by clustering analysis. These biomarkers identified as useful for classifying tumors according to regulation status of the RAS signaling pathway, predicting response of a cancer patient to a compound that modulates the RAS signaling pathway, predicting resistance of a cancer patient to a compound that modulates the PI3K signaling pathway or EGFR, or measuring pharmacodynamic effect on the RAS signaling pathway of a therapeutic agent, are listed as SEQ ID NOs: 1-105 and 211-252 (see also Tables 2a and 2b). Another aspect of the invention provides a method of using these biomarkers to distinguish tumor types in diagnosis or to predict response to therapeutic agents. In one embodiment of the invention, the 147 biomarker set may be split into two opposing “arms”—the “up” arm (see Table 2a), which are the 105 genes that are upregulated, and the “down” arm (Table 2b), which are the 42 genes that are downregulated, as signaling through the RAS pathway increases.

[0057] In one embodiment, the invention provides a set of 147 biomarkers that can classify tumors by RAS pathway regulation status, i.e., distinguish between tumors having regulated and deregulated RAS signaling pathways. These biomarkers are listed in Tables 2a and 2b. The invention also provides subsets of at least 5, 10, 20, 30, 40, 50, 60, 70, 80, 90, 100, 110, 120, 130, and 140 biomarkers, drawn from the set of 147 (Tables 2a and 2b), wherein at least one biomarker from the subset is selected from Table 2b, that can distinguish between tumors having deregulated and regulated RAS signaling pathways. Alternatively, at least 2, 3, 4, 5, 6, 7, 8, 9, 10, 11, 12, 13, 14, 15, 16, 17, 18, 19, 20, 21, 22, 23, 24, 25, 26, 27, 28, 29, 30, 31, 32, 33, 34, 35, 36, 37, 38, 39, 40, 41, or 42 biomarkers is selected from Table 2b for each aforementioned subset. Alternatively, a subset of at least 3, 5, 10, 15, 20, 25, 30, 35, 40, 45, 50, 55, 60, 65, 70, 75, 80, 85, 90, 95, or 100 biomarkers, drawn from the “up” arm (see Table 2a) and a subset of at least 3, 5, 10, 15, 20, 25, 30, 35, or 40 biomarkers from the “down” arm (see Table 2b) that can distinguish between tumors having deregulated and regulated RAS signaling pathways are provided. The invention also provides a method of using the above biomarkers to distinguish between tumors having deregulated or regulated RAS signaling pathway.

[0058] In another embodiment, the invention provides a set of 147 genetic biomarkers that can be used to predict response of a subject to a RAS signaling pathway agent. In a more specific embodiment, the invention provides a subset of at least 5, 10, 20, 30, 40, 50, 60, 70, 80, 90, 100, 110, 120, 130, and 140 biomarkers, drawn from the set of 147 (Tables 2a and 2b), wherein at least one biomarker from the subset is selected from Table 2b, that can be used to predict the response of a subject to an agent that modulates the RAS signaling pathway. In another embodiment, the invention provides a set of 147 biomarkers that can be used to select a RAS pathway agent for treatment of a subject with cancer. In a more specific embodiment, the invention provides a subset of at least 5, 10, 20, 30, 40, 50, 60, 70, 80, 90, 100, 110, 120, 130, and 140 biomarkers, drawn from the set of 147 (Tables 2a and 2b), wherein at least one biomarker from the subset is selected from Table 2b, that can be used to select a RAS pathway agent for treatment of a subject with cancer. Alternatively, at least 2, 3, 4, 5, 6, 7, 8, 9, 10, 11, 12, 13, 14, 15, 16, 17, 18, 19, 20, 21, 22, 23, 24, 25, 26, 27, 28, 29, 30, 31, 32, 33, 34, 35, 36, 37, 38, 39, 40, 41, or 42 biomarkers is selected from Table 2b for each aforementioned subset. Alternatively, a subset of at least 3, 5, 10, 15, 20, 25, 30, 35, 40, 45, 50, 55, 60, 65, 70, 75, 80, 85, 90, 95, or 100 biomarkers, drawn from the “up” arm (see Table 2a) and a subset of at least 3, 5, 10, 15, 20, 25, 30, 35, or 40 biomarkers from the “down” arm (see Table 2b) can be used to predict response of a subject to a RAS signaling pathway agent or to select a RAS signaling pathway agent for treatment of a subject with cancer.

[0059] In another embodiment, the invention provides a set of 147 genetic biomarkers that can be used to predict resistance of a subject to a PI3K signaling pathway agent. In a more specific embodiment, the invention provides a subset of at least 5, 10, 20, 30, 40, 50, 60, 70, 80, 90, 100, 110, 120, 130, and 140 biomarkers, drawn from the set of 147 (Tables 2a and 2b), wherein at least one biomarker from the subset is selected from Table 2b, that can be used to predict the resistance of a subject to an agent that modulates the PI3K signaling pathway. In another embodiment, the invention provides a set of 147 biomarkers that can be used to exclude a PI3K pathway agent for treatment of a subject with cancer. In a more specific embodiment, the invention provides a subset of at least 5, 10, 20, 30, 40, 50, 60, 70, 80, 90, 100, 110, 120, 130, and 140 biomarkers, drawn from the set of 147 (Tables 2a and 2b), wherein at least one biomarker from the subset is selected from Table 2b, that can be used to select a RAS pathway agent for treatment of a subject with cancer. Alternatively, at least 2, 3, 4, 5, 6, 7, 8, 9, 10, 11, 12, 13, 14, 15, 16, 17, 18, 19, 20, 21, 22, 23, 24, 25, 26, 27, 28, 29, 30, 31, 32, 33, 34, 35, 36, 37, 38, 39, 40, 41, or 42 biomarkers is selected from Table 2b for each aforementioned subset. Alternatively, a subset of at least 3, 5, 10, 15, 20, 25, 30, 35, 40, 45, 50, 55, 60, 65, 70, 75, 80, 85, 90, 95, or 100 biomarkers, drawn from the “up” arm (see Table 2a) and a subset of at least 3, 5, 10, 15, 20, 25, 30, 35, or 40 biomarkers from the “down” arm (see Table 2b) can be used to predict resistance of a subject to a PI3K signaling pathway agent or to exclude a PI3K signaling pathway agent for treatment of a subject with cancer.

[0060] In another embodiment, the invention provides a set of 147 genetic biomarkers that can be used to determine whether an agent has a pharmacodynamic effect on the RAS signaling pathway. The biomarkers provided may be used to monitor inhibition of the RAS signaling pathway at various time points following treatment with said agent. In a more specific embodiment, the invention provides a subset of at least 5, 10, 20, 30, 40, 50, 60, 70, 80, 90, 100, 110, 120, 130, and 140 biomarkers, drawn from the set of 147 (Tables 2a and 2b), wherein at least one biomarker from the subset is selected from Table 2b, that can be used to monitor pharmacodynamic activity of an agent on the RAS signaling pathway. Alternatively, at least 2, 3, 4, 5, 6, 7, 8, 9, 10, 11, 12, 13, 14, 15, 16, 17, 18, 19, 20, 21, 22, 23, 24, 25, 26, 27, 28, 29, 30, 31, 32, 33, 34, 35, 36, 37, 38, 39, 40, 41, or 42 biomarkers is selected from Table 2b for each aforementioned subset. Alternatively, a subset of at least 3, 5, 10, 15, 20, 25, 30, 35, 40, 45, 50, 55, 60, 65, 70, 75, 80, 85, 90, 95, or 100 biomarkers, drawn from the “up” arm (see Table 2a) and a subset of at least 3, 5, 10, 15, 20, 25, 30, 35, or 40 biomarkers from the “down” arm (see Table 2b) can be used to determine whether an agent has a pharmacodynamic effect on the RAS signaling pathway or monitor pharmacodynamic activity of an agent on the RAS signaling pathway.

[0061] Any of the sets of biomarkers provided above may be used alone specifically or in combination with biomarkers outside the set. For example, biomarkers that distinguish RAS signaling pathway regulation status may be used in combination with biomarkers that distinguish growth factor pathway signaling status (see PCT application, “Methods and Gene Expression Signature for Assessing Growth Factor Signaling Pathway Regulation Status” by James Watters et al., filed on Mar. 19, 2009, incorporated herein in its entirety) or p53 functional status (see U.S. non-provisional application, “Gene Expression Signature for Assessing p53 Pathway Functional Status,” by Andrey Loboda et al., filed Mar. 19, 2009, incorporated herein in its entirety). Any of the biomarker sets provided above may also be used in combination with other biomarkers for cancer, or for any other clinical or physiological condition.

### 3.3.2 Identification of the Biomarkers

[0062] The present invention provides sets of biomarkers for the identification of conditions or indications associated with cancer. Generally, the biomarker sets were identified by determining which of ˜44,000 human biomarkers had expression patterns that correlated with the conditions or indications.

[0063] In one embodiment, the method for identifying biomarker sets is as follows. After extraction and labeling of target polynucleotides, the expression of all biomarkers (genes) in a sample X is compared to the expression of all biomarkers in a standard or control. In one embodiment, the standard or control comprises target polynucleotides derived from a sample from a normal individual (i.e. an individual not having RAS pathway deregulation). Alternatively, the standard or control comprises polynucleotides derived from normal tissue adjacent to a tumor or from tumors not have RAS pathway deregulation. In a preferred embodiment, the standard or control is a pool of target polynucleotide molecules. The pool may be derived from collected samples from a number of normal individuals. In another embodiment, the pool comprises samples taken from a number of individuals with tumors not having RAS pathway deregulation. In another preferred embodiment, the pool comprises an artificially-generated population of nucleic acids designed to approximate the level of nucleic acid derived from each biomarker found in a pool of biomarker-derived nucleic acids derived from tumor samples. In yet another embodiment, the pool is derived from normal or cancer lines or cell line samples.

[0064] The comparison may be accomplished by any means known in the art. For example, expression levels of various biomarkers may be assessed by separation of target polynucleotide molecules (e.g. RNA or cDNA) derived from the biomarkers in agarose or polyacrylamide gels, followed by hybridization with biomarker-specific oligonucleotide probes. Alternatively, the comparison may be accomplished by the labeling of target polynucleotide molecules followed by separation on a sequencing gel. Polynucleotide samples are placed on the gel such that patient and control or standard polynucleotides are in adjacent lanes. Comparison of expression levels is accomplished visually or by means of densitometer. In a preferred embodiment, the expression of all biomarkers is assessed simultaneously by hybridization to a microarray. In each approach, biomarkers meeting certain criteria are identified as associated with tumors having RAS signaling pathway deregulation.

[0065] A biomarker is selected based upon significant difference of expression in a sample as compared to a standard or control condition. Selection may be made based upon either significant up- or down regulation of the biomarker in the patient sample. Selection may also be made by calculation of the statistical significance (i.e., the p-value) of the correlation between the expression of the biomarker and the condition or indication. Preferably, both selection criteria are used. Thus, in one embodiment of the invention, biomarkers associated with deregulated RAS signaling pathway in a tumor are selected where the biomarkers show both more than two-fold change (increase or decrease) in expression as compared to a standard, and the p-value for the correlation between the existence of RAS signaling pathway deregulation and the change in biomarker expression is no more than 0.01 (i.e., is statistically significant).

[0066] Expression profiles comprising a plurality of different genes in a plurality of N cancer tumor samples can be used to identify markers that correlate with, and therefore are useful for discriminating different clinical categories. In a specific embodiment, a correlation coefficient ρ between a vector \vec{c} representing clinical categories or clinical parameters, e.g., a regulated or deregulated RAS signaling pathway, in the N tumor samples and a vector \vec{r} representing the measured expression levels of a gene in the N tumor samples is used as a measure of the correlation between the expression level of the gene and RAS signaling pathway status. The expression levels can be a measured abundance level of a transcript of the gene, or any transformation of the measured abundance, e.g., a logarithmic or a log ratio. Specifically, the correlation coefficient may be calculated as:

ρ=(\vec{c}·\vec{r})/(∥\vec{c}∥·∥\vec{r}∥) (1)

[0067] Biomarkers for which the coefficient of correlation exceeds a cutoff are identified as RAS pathway signaling status-informative biomarkers specific for a particular clinical category, e.g., deregulated RAS pathway signaling status, within a given patient subset. Such a cutoff or threshold may correspond to a certain significance of the set of obtained discriminating genes. The threshold may also be selected based on the number of samples used. For example, a threshold can be calculated as 3×1/\sqrt{n−3}, where 1/\sqrt{n−3} is the distribution width and n=the number of samples. In a specific embodiment, markers are chosen if the correlation coefficient is greater than about 0.3 or less than about −0.3.

[0068] Next, the significance of the set of biomarker genes can be evaluated. The significance may be calculated by any appropriate statistical method. In a specific example, a Monte-Carlo technique is used to randomize the association between the expression profiles of the plurality of patients and the clinical categories to generate a set of randomized data. The same biomarker selection procedure as used to select the biomarker set is applied to the randomized data to obtain a control biomarker set. A plurality of such runs can be performed to generate a probability distribution of the number of genes in control biomarker sets. In a preferred embodiment, 10,000 such runs are performed. From the probability distribution, the probability of finding a biomarker set consisting of a given number of biomarkers when no correlation between the expression levels and phenotype is expected (i.e., based randomized data) can be determined The significance of the biomarker set obtained from the real data can be evaluated based on the number of biomarkers in the biomarker set by comparing to the probability of obtaining a control biomarker set consisting of the same number of biomarkers using the randomized data. In one embodiment, if the probability of obtaining a control biomarker set consisting of the same number of biomarkers using the randomized data is below a given probability threshold, the biomarker set is said to be significant.

[0069] Once a biomarker set is identified, the biomarkers may be rank-ordered in order of correlation or significance of discrimination. One means of rank ordering is by the amplitude of correlation between the change in gene expression of the biomarker and the specific condition being discriminated. Another, preferred, means is to use a statistical metric. In a specific embodiment, the metric is a t-test-like statistic:

$$t = \frac{( 〈 {x}_{1} 〉 - 〈 {x}_{2} 〉 )}{\sqrt{[ {σ}_{1}^{2} ( {n}_{1} - 1 ) + {σ}_{2}^{2} ( {n}_{2} - 1 ) ] / ( {n}_{1} + {n}_{2} - 1 ) / ( 1 / {n}_{1} + 1 / {n}_{2} )}} \qquad ( 2 )$$

[0070] In this equation, [symbol] x₁ [symbol] is the error-weighted average of the log ratio of transcript expression measurements within a first clinical group (e.g., deregulated RAS pathway signaling), [symbol] (x₂) [symbol] is the error-weighted average of log ratio within a second, related clinical group (e.g., regulated RAS pathway signaling), σ₁ is the variance of the log ratio within the first clinical group (e.g., deregulated RAS pathway signaling), n₁ is the number of samples for which valid measurements of log ratios are available, σ₂ is the variance of log ratio within the second clinical group (e.g., regulated RAS pathway signaling), and n₂ is the number of samples for which valid measurements of log ratios are available. The t-value represents the variance-compensated difference between two means. The rank-ordered biomarker set may be used to optimize the number of biomarkers in the set used for discrimination.

[0071] A set of genes for RAS pathway signaling status can also be identified using an iterative approach. This is accomplished generally in a “leave one out” method as follows. In a first run, a subset, for example five, of the biomarkers from the top of the ranked list is used to generate a template, where out of N samples, N-1 are used to generate the template, and the status of the remaining sample is predicted. This process is repeated for every sample until every one of the N samples is predicted once. In a second run, one or more additional biomarkers, for example five additional biomarkers, are added, so that a template is now generated from 10 biomarkers, and the outcome of the remaining sample is predicted. This process is repeated until the entire set of biomarkers is used to generate the template. For each of the runs, type 1 error (false negative) and type 2 errors (false positive) are counted. The set of top-ranked biomarkers that corresponds to lowest type 1 error rate, or type 2 error rate, or preferably the total of type 1 and type 2 error rate is selected.

[0072] For RAS pathway signaling status biomarkers, validation of the marker set may be accomplished by an additional statistic, a survival model. This statistic generates the probability of tumor distant metastases as a function of time since initial diagnosis. A number of models may be used, including Weibull, normal, log-normal, log logistic, log-exponential, or log-Rayleigh (Chapter 12 “Life Testing”, S-PLUS 2000 GUIDE TO STATISTICS, Vol. 2, p. 368 (2000)). For the “normal” model, the probability of distant metastases P at time t is calculated as

P=α×exp(−t²/τ²) (3)

where a is fixed and equal to 1, and τ is a parameter to be fitted and measures the “expected lifetime”.

[0073] It is preferable that the above biomarker identification process be iterated one or more times by excluding one or more samples from the biomarker selection or ranking (i.e., from the calculation of correlation). Those samples being excluded are the ones that can not be predicted correctly from the previous iteration. Preferably, those samples excluded from biomarker selection in this iteration process are included in the classifier performance evaluation, to avoid overstating the performance.

[0074] Once a set of genes for RAS pathway signaling status has been identified, the biomarkers may be split into two opposing “arms” —the “up” arm (see Table 2a), which are the genes that are upregulated, and the “down” arm (see Table 2b), which are the genes that are down-regulated, as signaling through the RAS pathway increases.

[0075] It will be apparent to those skilled in the art that the above methods, in particular the statistical methods, described above, are not limited to the identification of biomarkers associated with RAS signaling pathway regulation status, but may be used to identify set of biomarker genes associated with any phenotype. The phenotype can be the presence or absence of a disease such as cancer, or the presence or absence of any identifying clinical condition associated with that cancer. In the disease context, the phenotype may be prognosis such as survival time, probability of distant metastases of disease condition, or likelihood of a particular response to a therapeutic or prophylactic regimen. The phenotype need not be cancer, or a disease; the phenotype may be a nominal characteristic associated with a healthy individual.

### 3.3.3 Sample Collection

[0076] In the present invention, target polynucleotide molecules are typically extracted from a sample taken from an individual afflicted with cancer or tumor cell lines, and corresponding normal/control tissues or cell lines, respectively. The sample may be collected in any clinically acceptable manner, but must be collected such that biomarker-derived polynucleotides (i.e., RNA) are preserved. mRNA or nucleic acids derived therefrom (i.e., cDNA or amplified DNA) are preferably labeled distinguishably from standard or control polynucleotide molecules, and both are simultaneously or independently hybridized to a microarray comprising some or all of the biomarkers or biomarker sets or subsets described above. Alternatively, mRNA or nucleic acids derived therefrom may be labeled with the same label as the standard or control polynucleotide molecules, wherein the intensity of hybridization of each at a particular probe is compared. A sample may comprise any clinically relevant tissue sample, such as a tumor biopsy or fine needle aspirate, or a sample of bodily fluid, such as blood, plasma, serum, lymph, ascitic fluid, cystic fluid, urine. The sample may be taken from a human, or, in a veterinary context, from non-human animals such as ruminants, horses, swine or sheep, or from domestic companion animals such as felines and canines. Additionally, the samples may be from frozen or archived formalin-fixed, paraffin-embedded (FFPE) tissue samples.

[0077] Methods for preparing total and poly(A)+ RNA are well known and are described generally in Sambrook et al., MOLECULAR CLONING—A LABORATORY MANUAL (2ND ED.), Vols. 1-3, Cold Spring Harbor Laboratory, Cold Spring Harbor, N.Y. (1989)) and Ausubel et al., CURRENT PROTOCOLS 1N MOLECULAR BIOLOGY, vol. 2, Current Protocols Publishing, New York (1994)).

[0078] RNA may be isolated from eukaryotic cells by procedures that involve lysis of the cells and denaturation of the proteins contained therein. Cells of interest include wild-type cells (i.e., non-cancerous), drug-exposed wild-type cells, tumor- or tumor-derived cells, modified cells, normal or tumor cell line cells, and drug-exposed modified cells.

[0079] Additional steps may be employed to remove DNA. Cell lysis may be accomplished with a nonionic detergent, followed by microcentrifugation to remove the nuclei and hence the bulk of the cellular DNA. In one embodiment, RNA is extracted from cells of the various types of interest using guanidinium thiocyanate lysis followed by CsCl centrifugation to separate the RNA from DNA (Chirgwin et al., Biochemistry 18:5294-5299 (1979)). Poly(A)+ RNA is selected by selection with oligo-dT cellulose (see Sambrook et al, MOLECULAR CLONING—A LABORATORY MANUAL (2ND ED.), Vols. 1-3, Cold Spring Harbor Laboratory, Cold Spring Harbor, N.Y. (1989). Alternatively, separation of RNA from DNA can be accomplished by organic extraction, for example, with hot phenol or phenol/chloroform/isoamyl alcohol.

[0080] If desired, RNase inhibitors may be added to the lysis buffer. Likewise, for certain cell types, it may be desirable to add a protein denaturation/digestion step to the protocol.

[0081] For many applications, it is desirable to preferentially enrich mRNA with respect to other cellular RNAs, such as transfer RNA (tRNA) and ribosomal RNA (rRNA). Most mRNAs contain a poly(A) tail at their 3′ end. This allows them to be enriched by affinity chromatography, for example, using oligo(dT) or poly(U) coupled to a solid support, such as cellulose or Sephadex® (see Ausubel et al., CURRENT PROTOCOLS 1N MOLECULAR BIOLOGY, vol. 2, Current Protocols Publishing, New York (1994). Once bound, poly(A)+ mRNA is eluted from the affinity column using 2 mM EDTA/0.1% SDS.

[0082] The sample of RNA can comprise a plurality of different mRNA molecules, each different mRNA molecule having a different nucleotide sequence. In a specific embodiment, the mRNA molecules in the RNA sample comprise at least 100 different nucleotide sequences. More preferably, the mRNA molecules of the RNA sample comprise mRNA molecules corresponding to each of the biomarker genes. In another specific embodiment, the RNA sample is a mammalian RNA sample.

[0083] In a specific embodiment, total RNA or mRNA from cells is used in the methods of the invention. The source of the RNA can be cells of a plant or animal, human, mammal, primate, non-human animal, dog, cat, mouse, rat, bird, yeast, eukaryote, prokaryote, etc. In specific embodiments, the method of the invention is used with a sample containing total mRNA or total RNA from 1×10⁶ cells or less. In another embodiment, proteins can be isolated from the foregoing sources, by methods known in the art, for use in expression analysis at the protein level.

[0084] Probes to the homologs of the biomarker sequences disclosed herein can be employed preferably wherein non-human nucleic acid is being assayed.

### 3.4 METHODS OF USING RAS SIGNALING PATHWAY DEREGULATION BIOMARKER SETS

### 3.4.1 Diagnostic/Tumor Classification Methods

[0085] The invention provides for methods of using the biomarker sets to analyze a sample from an individual so as to determine or classify the individual's tumor type at a molecular level, whether a tumor has a deregulated or regulated RAS signaling pathway. The individual need not actually be afflicted with cancer. Essentially, the expression of specific biomarker genes in the individual, or a sample taken therefrom, is compared to a standard or control. For example, assume two cancer-related conditions, X and Y. One can compare the level of expression of RAS signaling pathway biomarkers for condition X in an individual to the level of the biomarker-derived polynucleotides in a control, wherein the level represents the level of expression exhibited by samples having condition X. In this instance, if the expression of the markers in the individual's sample is substantially (i.e., statistically) different from that of the control, then the individual does not have condition X. Where, as here, the choice is bimodal (i.e. a sample is either X or Y), the individual can additionally be said to have condition Y. Of course, the comparison to a control representing condition Y can also be performed. Preferably, both are performed simultaneously, such that each control acts as both a positive and a negative control. The distinguishing result may thus either be a demonstrable difference from the expression levels (i.e. the amount of marker-derived RNA, or polynucleotides derived therefrom) represented by the control, or no significant difference.

[0086] Thus, in one embodiment, the method of determining a particular tumor-related status of an individual comprises the steps of (1) hybridizing labeled target polynucleotides from an individual to a microarray containing the above biomarker set or a subset of the biomarkers; (2) hybridizing standard or control polynucleotide molecules to the microarray, wherein the standard or control molecules are differentially labeled from the target molecules; and (3) determining the difference in transcript levels, or lack thereof, between the target and standard or control, wherein the difference, or lack thereof, determines the individual's tumor-related status. In a more specific embodiment, the standard or control molecules comprise biomarker-derived polynucleotides from a pool of samples from normal individuals, a pool of samples from normal adjacent tissue, or a pool of tumor samples from individuals with cancer. In a preferred embodiment, the standard or control is artificially-generated pool of biomarker-derived polynucleotides, which pool is designed to mimic the level of biomarker expression exhibited by clinical samples of normal or cancer tumor tissue having a particular clinical indication (i.e. cancerous or non-cancerous; RAS signaling pathway regulated or deregulated). In another specific embodiment, the control molecules comprise a pool derived from normal or cancer cell lines.

[0087] The present invention provides a set of biomarkers useful for distinguishing deregulated from regulated RAS signaling pathway tumor types. Thus, in one embodiment of the above method, the level of polynucleotides (i.e., mRNA or polynucleotides derived therefrom) in a sample from an individual, expressed from the biomarkers provided in Tables 2a and 2b are compared to the level of expression of the same biomarkers from a control, wherein the control comprises biomarker-related polynucleotides derived from deregulated RAS signaling pathway tumor samples, regulated RAS signaling pathway tumor samples, or both. The comparison may be to both deregulated and regulated RAS signaling pathway tumor samples, and the comparison may be to polynucleotide pools from a number of deregulated and regulated RAS signaling pathway tumor samples, respectively. Where the individual's biomarker expression most closely resembles or correlates with the deregulated control, and does not resemble or correlate with the regulated control, the individual is classified as having a deregulated RAS signaling pathway. Where the pool is not pure deregulated or regulated RAS signaling pathway type tumors samples, for example, a sporadic pool is used, a set of experiments using individuals with known RAS signaling pathway status may be hybridized against the pool in order to define the expression templates for the deregulated and regulated group. Each individual with unknown RAS signaling pathway status is hybridized against the same pool and the expression profile is compared to the template(s) to determine the individual's RAS signaling pathway status.

[0088] In another specific embodiment, the method comprises:

[0089] (i) calculating a measure of similarity between a first expression profile and a deregulated RAS signaling pathway template, or calculating a first measure of similarity between said first expression profile and said deregulated RAS signaling pathway template and a second measure of similarity between said first expression profile and a regulated RAS signaling pathway template, said first expression profile comprising the expression levels of a first plurality of genes in the tumor cell sample, said deregulated RAS signaling pathway template comprising expression levels of said first plurality of genes that are average expression levels of the respective genes in a plurality of tumor cell samples having at least one or more components of said RAS signaling pathway with abnormal activity, and said regulated RAS signaling pathway template comprising expression levels of said first plurality of genes that are average expression levels of the respective genes in a plurality of tumor cells samples not having at least one or more components of said RAS signaling pathway with abnormal activity, said first plurality of genes consisting of at least 5 of the genes for which biomarkers are listed in Tables 2a and 2b, wherein at least 1 gene of said 5 genes is selected from Table 2b;

[0090] (ii) classifying said tumor cell sample as having said deregulated RAS signaling pathway if said first expression profile has a high similarity to said deregulated RAS signaling pathway template or has a higher similarity to said deregulated RAS signaling pathway template than to said regulated RAS signaling pathway template, or classifying said tumor cell sample as having said regulated RAS signaling pathway if said first expression profile has a low similarity to said deregulated RAS signaling pathway template or has a higher similarity to said regulated RAS signaling pathway template than to said deregulated RAS signaling pathway template; wherein said first expression profile has a high similarity to said deregulated RAS signaling pathway template if the similarity to said deregulated RAS signaling pathway template is above a predetermined threshold, or has a low similarity to said deregulated RAS signaling pathway template if the similarity to said deregulated RAS signaling pathway template is below said predetermined threshold; and

[0091] (iii) displaying; or outputting to a user, user interface device, a computer readable storage medium, or a local or remote computer system; the classification produced by said classifying step (ii).

[0092] For the above embodiments, the fullest of biomarkers may be used (i.e., the complete set of biomarkers from Tables 2a and 2b). In other embodiments, subsets 10, 15, 20, 25, 30, 35, 40, 45, 50, 55, 60, 65, 70, 75, 80, 85,90, 95, 100, 105, 110, 115, 120, 125, 130, 135, or 140 of the 147 biomarkers may be used, wherein at least 1, 2, 3, 4, 5, 6, 7, 8, 9, 10, 11, 12, 13, 14, 15, 16, 17, 18, 19, 20, 21, 22, 23, 24, 25, 26, 27, 28, 29, 30, 31, 32, 33, 34, 35, 36, 37, 38, 39, 40, 41, or 42 biomarkers of each subset is selected from Table 2b. Alternatively, a subset of at least 3, 5, 10, 15, 20, 25, 30, 35, 40, 45, 50, 55, 60, 65, 70, 75, 80, 85, 90, 95, or 100 biomarkers, drawn from the “up” arm (see Table 2a) and a subset of at least 3, 5, 10, 15, 20, 25, 30, 35, or 40 biomarkers from the “down” arm (see Table 2b) can be used.

[0093] In another embodiment, the expression profile is a differential expression profile comprising differential measurements of said plurality of genes in a sample derived from a patient versus measurements of said plurality of genes in a control sample. The differential measurements can be xdev, log(ratio), error-weighted log(ratio), or a mean subtracted log(intensity) (see, e.g., PCT publication WO00/39339, published on Jul. 6, 2000; PCT publication WO2004/065545, published Aug. 5, 2004, each of which is incorporated herein by reference in its entirety).

[0094] The similarity between the biomarker expression profile of a sample or an individual and that of a control can be assessed a number of ways using any method known in the art. For example, Dai et al. describe a number of different ways of calculating gene expression templates and corresponding biomarker genets useful in classifying breast cancer patients (U.S. Pat. No. 7,171,311; WO2002/103320; WO2005/086891; WO2006015312; WO2006/084272). Similarly, Linsley et al. (US2003/0104426) and Radish et al. (US20070154931) disclose gene biomarker genesets and methods of calculating gene expression templates useful in classifying chronic myelogenous leukemia patients. In the simplest case, the profiles can be compared visually in a printout of expression difference data. Alternatively, the similarity can be calculated mathematically.

[0095] In one embodiment, the similarity measure between two patients (or samples) x and y, or patient (or sample) x and a template y, can be calculated using the following equation:

$$S = 1 - [ \frac{{\sum }_{i = 1}^{{N}_{V}} \frac{( {x}_{i} - \overline{x} )}{{σ}_{{x}_{i}}} \frac{( {y}_{i} - \overline{y} )}{{σ}_{{y}_{i}}}}{\sqrt{{\sum }_{i = 1}^{{N}_{V}} {( \frac{{x}_{i} - \overline{x}}{{σ}_{{x}_{i}}} )}^{2} {\sum }_{i = 1}^{{N}_{V}} {( \frac{{y}_{i} - \overline{y}}{{σ}_{{y}_{i}}} )}^{2}}} ] \qquad ( 4 )$$

In this equation, χ and y are two patients with components of log ratio xᵢ and yᵢ, i=1, 2, . . . , N=4,986. Associated with every value xᵢ is error σₓ. The smaller the value σₓ, the more reliable

$${x}_{i} \cdot \overline{x} = \frac{{\sum }_{i = 1}^{{N}_{V}} \frac{{x}_{i}}{{σ}_{{x}_{i}}^{2}}}{{\sum }_{i = 1}^{{N}_{V}} \frac{1}{{σ}_{{x}_{i}}^{2}}}$$

the measurement is the error-weighted arithmetic mean.

[0096] In one embodiment, the similarity is represented by a correlation coefficient between the patient or sample profile and the template. In one embodiment, a correlation coefficient above a correlation threshold indicates high similarity, whereas a correlation coefficient below the threshold indicates low similarity. In some embodiments, the correlation threshold is set as 0.3, 0.4, 0.5, or 0.6. In another embodiment, similarity between a sample or patient profile and a template is represented by a distance between the sample profile and the template. In one embodiment, a distance below a given value indicates a high similarity, whereas a distance equal to or greater than the given value indicates low similarity.

[0097] In a preferred embodiment, templates are developed for sample comparison. The template may be defined as the error-weighted log ratio average of the expression difference for the group of biomarker genes able to differentiate the particular RAS signaling pathway regulation status. For example, templates are defined for deregulated RAS signaling pathway samples and for regulated RAS signaling pathway samples. Next, a classifier parameter is calculated. This parameter may be calculated using either expression level differences between the sample and template, or by calculation of a correlation coefficient. Such a coefficient, Pᵢ, can be calculated using the following equation:

Pᵢ=(\vec{c}ᵢ·\vec{y})/(∥\vec{c}ᵢ∥·∥\vec{c}ᵢ∥·∥\vec{y}) (5)

where i=1 and 2.

[0098] As an illustration, in one embodiment, a template for a sample classification based upon one phenotypic endpoint, for example, RAS signaling pathway deregulated status, is defined as \vec{c}₁ (e.g., a profile consisting of correlation values, C₁, associated with, for example, RAS signaling pathway regulation status) and/or a template for second phenotypic endpoint, i.e., RAS signaling pathway regulated status, is defined as \vec{c}₂ (e.g., a profile consisting of correlation values, C₂, associated with, for example, RAS signaling pathway regulation status). Either one or both of the two classifier parameters (P₁ and P₂) can then be used to measure degrees of similarities between a sample's profile and the templates: P₁ measures the similarity between the sample's profile \vec{y} and the first expression template \vec{c}₁, and P₂ measures the similarity between \vec{y} and the second expression template \vec{c}₂.

[0099] Thus, in one embodiment, \vec{y} is classified, for example, as a deregulated RAS signaling pathway profile if P₁ is greater than a selected correlation threshold or if P₂ is equal to or less than a selected correlation threshold. In another embodiment, \vec{y} is classified, for example, as a regulated RAS signaling pathway profile if P₁ is less than a selected correlation threshold or if P₂ is above a selected correlation threshold. In still another embodiment, \vec{y} is classified, for example, as a deregulated RAS signaling pathway profile if P₁ is greater than a first selected correlation threshold and \vec{y} is classified, for example, as a regulated RAS signaling pathway profile if P₂ is greater than a second selected correlation threshold.

[0100] Thus, in a more specific embodiment, the above method of determining a particular tumor-related status of an individual comprises the steps of (1) hybridizing labeled target polynucleotides from an individual to a microarray containing one of the above marker sets; (2) hybridizing standard or control polynucleotides molecules to the microarray, wherein the standard or control molecules are differentially labeled from the target molecules; and (3) determining the ratio (or difference) of transcript levels between two channels (individual and control), or simply the transcript levels of the individual; and (4) comparing the results from (3) to the predefined templates, wherein said determining is accomplished by any means known in the art (see Section 3.4.6 on Methods for Classification of Expression Profiles), and wherein the difference, or lack thereof, determines the individual's tumor-related status.

[0101] The method can use the fullest of biomarkers (i.e., the complete set of biomarkers from Tables 2a and 2b). However, subsets of at least 10, 15, 20, 25, 30, 35, 40, 45, 50, 55, 60, 65, 70, 75, 80, 85,90, 95, 100, 105, 110, 115, 120, 125, 130, 135, or 140 of the 147 biomarkers may be used, wherein at least 1, 2, 3, 4, 5, 6, 7, 8, 9, 10, 11, 12, 13, 14, 15, 16, 17, 18, 19, 20, 21, 22, 23, 24, 25, 26, 27, 28, 29, 30, 31, 32, 33, 34, 35, 36, 37, 38, 39, 40, 41, or 42 biomarkers of each subset is selected from Table 2b. Alternatively, a subset of at least 3, 5, 10, 15, 20, 25, 30, 35, 40, 45, 50, 55, 60, 65, 70, 75, 80, 85, 90, 95, or 100 biomarkers, drawn from the “up” arm (see Table 2a) and a subset of at least 3, 5, 10, 15, 20, 25, 30, 35, or 40 biomarkers from the “down” arm (see Table 2b) can be used.

[0102] In another embodiment, the above method of determining the RAS pathway regulation status of an individual uses the two “arms” of the 147 biomarkers. The “up” arm comprises the 105 genes whose expression goes up with RAS pathway activation (see Table 2a), and the “down” arm comprises the 42 genes whose expression goes down with RAS pathway activation (see Table 2b). When comparing an individual sample with a standard or control, the expression value of gene X in the sample is compared to the expression value of gene X in the standard or control. For each gene in the set of biomarkers, log(10) ratio is created for the expression value in the individual sample relative to the standard or control (differential expression value). A signature “score” is calculated by determining the mean log(10) ratio of the genes in the “up” and then subtracting the mean log(10) ratio of the genes in the “down” arm. To determine if this signature score is significant, an ANOVA calculation is performed (for example, a two tailed t-test, Wilcoxon rank-sum test, Kolmogorov-Smirnov test, etc.), in which the expression values of the genes in the two opposing arms are compared to one another. For example, if the two tailed t-test is used to determine whether the mean log(10) ratio of the genes in the “up” arm is significantly different than the mean log(10) ratio of the genes in the “down” arm, a p-value of <0.05 indicates that the signature in the individual sample is significantly different from the standard or control. If the signature score for a sample is above a pre-determined threshold, then the sample is considered to have deregulation of the RAS signaling pathway. The pre-determined threshold may be 0, or may be the mean, median, or a percentile of signature scores of a collection of samples or a pooled sample used as a standard or control. In an alternative embodiment, a subset of at least 3, 5, 10, 15, 20, 25, 30, 35, 40, 45, 50, 55, 60, 65, 70, 75, 80, 85, 90, 95, or 100 biomarkers, drawn from the “up” arm (see Table 2a) and a subset of at least 3, 5, 10, 15, 20, 25, 30, 35, or 40 biomarkers from the “down” arm (see Table 2b) can be used may be used for calculating this signature score. It will be recognized by those skilled in the art that other differential expression values, besides log(10) ratio may be used for calculating a signature score, as long as the value represents an objective measurement of transcript abundance of the biomarker gene. Examples include, but are not limited to: xdev, error-weighted log(ratio), and mean subtracted log(intensity).

[0103] The above described methods of using the biomarker sets may also be used to analyze a sample from an individual and then rank order the sample according to its RAS pathway deregulation status. A sample may be compared to a reference template to determine a ranking order. A sample may also be compared to a pre-determined threshold, such as a mean expression value of a biomarker set or subset for a reference sample, to determine a ranking order. A reference sample may be a “deregulated” or “regulated” RAS signaling pathway sample. A sample may also be compared to a pool of samples, and rank ordered by comparison with a pre-determined threshold of the pool of samples, such as the mean, median, or percentile expression value of a biomarker set or subset. A sample may also be rank ordered according to its signature score.

### 3.4.2 Methods of Predicting Response to Treatment and Assigning Treatment

[0104] The invention provides a set of biomarkers useful for distinguishing samples from those patients who are predicted to respond to treatment with an agent that modulates the RAS signaling pathway from patients who are not predicted to respond to treatment an agent that modulates the RAS signaling pathway. Thus, the invention further provides a method for using these biomarkers for determining whether an individual with cancer is a predicted responder to treatment with an agent that modulates the RAS signaling pathway. In one embodiment, the invention provides for a method of predicting response of a cancer patient to an agent that modulates the RAS signaling pathway comprising (1) comparing the level of expression of the biomarkers listed in Tables 2a and 2b in a sample taken from the individual to the level of expression of the same biomarkers in a standard or control, where the standard or control levels represent those found in a sample having a deregulated RAS signaling; and (2) determining whether the level of the biomarker-related polynucleotides in the sample from the individual is significantly different than that of the control, wherein if no substantial difference is found, the patient is predicted to respond to treatment with an agent that modulates the RAS signaling pathway, and if a substantial difference is found, the patient is predicted not to respond to treatment with an agent that modulates the RAS signaling pathway. Persons of skill in the art will readily see that the standard or control levels may be from a tumor sample having a regulated RAS signaling pathway. In a more specific embodiment, both controls are run. In case the pool is not pure “RAS regulated” or “RAS deregulated,” a set of experiments of individuals with known responder status should be hybridized against the pool to define the expression templates for the predicted responder and predicted non-responder group. Each individual with unknown outcome is hybridized against the same pool and the resulting expression profile is compared to the templates to predict its outcome.

[0105] RAS signaling pathway deregulation status of a tumor may indicate a subject that is responsive to treatment with an agent that modulates the RAS signaling pathway and not responsive to PI3K pathway inhibitors. Therefore, the invention provides for a method of determining or assigning a course of treatment of a cancer patient, comprising determining whether the level of expression of the 147 biomarkers of Table 2a and 2b, or a subset thereof, correlates with the level of these biomarkers in a sample representing deregulated RAS signaling pathway status or regulated RAS signaling pathway status; and determining or assigning a course of treatment, wherein if the expression correlates with the deregulated RAS signaling pathway status pattern, the tumor is treated with an agent that modulates the RAS signaling pathway and not treated with a PI3K pathway agent.

[0106] As with the diagnostic biomarkers, the method can use the fullest of biomarkers (i.e., the complete set of biomarkers from Tables 2a and 2b). However, subsets of at least 10, 15, 20, 25, 30, 35, 40, 45, 50, 55, 60, 65, 70, 75, 80, 85,90, 95, 100, 105, 110, 115, 120, 125, 130, 135, or 140 of the 147 biomarkers may be used, wherein at least 1, 2, 3, 4, 5, 6, 7, 8, 9, 10, 11, 12, 13, 14, 15, 16, 17, 18, 19, 20, 21, 22, 23, 24, 25, 26, 27, 28, 29, 30, 31, 32, 33, 34, 35, 36, 37, 38, 39, 40, 41, or 42 biomarkers of each subset is selected from Table 2b. Alternatively, a subset of at least 3, 5, 10, 15, 20, 25, 30, 35, 40, 45, 50, 55, 60, 65, 70, 75, 80, 85, 90, 95, or 100 biomarkers, drawn from the “up” arm (see Table 2a) and a subset of at least 3, 5, 10, 15, 20, 25, 30, 35, or 40 biomarkers from the “down” arm (see Table 2b) can be used.

[0107] Classification of a sample as “predicted responder” or “predicted non-responder” is accomplished substantially as for the diagnostic biomarkers described above, wherein a template is generated to which the biomarker expression levels in the sample are compared.

[0108] In another embodiment, the above method of using RAS pathway regulation status of an individual to predict treatment response or assign treatment uses the two “arms” of the 147 biomarkers. The “up” arm comprises the 105 genes whose expression goes up with RAS pathway activation (see Table 2a), and the “down” arm comprises the 42 genes whose expression goes down with RAS pathway activation (see Table 2b). When comparing an individual sample with a standard or control, the expression value of gene X in the sample is compared to the expression value of gene X in the standard or control. For each gene in the set of biomarkers, log(10) ratio is created for the expression value in the individual sample relative to the standard or control. A signature “score” is calculated by determining the mean log(10) ratio of the genes in the “up” and then subtracting the mean log(10) ratio of the genes in the “down” arm. If the signature score is above a pre-determined threshold, then the sample is considered to have deregulation of the RAS signaling pathway. The pre-determined threshold may be 0, or may be the mean, median, or a percentile of signature scores of a collection of samples or a pooled sample used as a standard of control. To determine if this signature score is significant, an ANOVA calculation is performed (for example, a two tailed t-test, Wilcoxon rank-sum test, Kolmogorov-Smirnov test, etc.), in which the expression values of the genes in the two opposing arms are compared to one another. For example, if the two tailed t-test is used to determine whether the mean log(10) ratio of the genes in the “up” arm is significantly different than the mean log(10) ratio of the genes in the “down” arm, a p-value of <0.05 indicates that the signature in the individual sample is significantly different from the standard or control. In an alternative embodiment, a subset of at least 3, 5, 10, 15, 20, 25, 30, 35, 40, 45, 50, 55, 60, 65, 70, 75, 80, 85, 90, 95, or 100 biomarkers, drawn from the “up” arm (see Table 2a) and a subset of at least 3, 5, 10, 15, 20, 25, 30, 35, or 40 biomarkers from the “down” arm (see Table 2b) can be used may be used for calculating this signature score. It will be recognized by those skilled in the art that other differential expression values, besides log(10) ratio may be used for calculating a signature score, as long as the value represents an objective measurement of transcript abundance of the biomarker gene. Examples include, but are not limited to: xdev, error-weighted log(ratio), and mean subtracted log(intensity).

[0109] The use of the biomarkers is not restricted to predicting response to agents that modulate RAS signaling pathway for cancer-related conditions, and may be applied in a variety of phenotypes or conditions, clinical or experimental, in which gene expression plays a role. Where a set of biomarkers has been identified that corresponds to two or more phenotypes, the biomarker sets can be used to distinguish these phenotypes. For example, the phenotypes may be the diagnosis and/or prognosis of clinical states or phenotypes associated with cancers and other disease conditions, or other physiological conditions, prediction of response to agents that modulate pathways other than the RAS signaling pathway, wherein the expression level data is derived from a set of genes correlated with the particular physiological or disease condition.

### 3.4.3 Method of Determining Whether an Agent Modulates the RAS Signaling Pathway

[0110] The invention provides a set of biomarkers useful for and methods of using the biomarkers for identifying or evaluating an agent that is predicted to modify or modulate the RAS signaling pathway in a subject. “RAS signaling pathway” or “RAS pathway” is initiated by growth factors through receptor tyrosine kinases. The autophosphorylated receptor binds to the SH2 domain of GRB2. Through its SH3 domain, GRB2 is bound to SOS, so activation of the receptor tyrosine kinase results in recruitment of SOS to the plasma membrane, where RAS is also localized as a result of farnesylation. The increased proximity of SOS to RAS results in increased nucleotide exchange on RAS, with GDP being replaced with GTP. GTP-bound RAS is able to bind and activate several families of effector enzymes (such as the RAF, PI3K, RALGDS, and PLCε pathways)(reviewed in Downward, 2003, Nat. Rev. Cancer 3:11-22)(See FIG. 1). This signaling cascade affects multiple cellular processes, such as cell-cycle progression, transcription, survival, cytoskeletal signals, translation, vesicle transport, and calcium signaling.

[0111] Agents affecting the RAS signaling pathway include small molecule compounds; proteins or peptides (including antibodies); siRNA, shRNA, or microRNA molecules; or any other agents that modulate one or more genes or proteins that function within the RAS signaling pathway or other signaling pathways that interact with the RAS signaling pathway.

[0112] “RAS pathway agent” refers to an agent that modulates signaling through the RAS pathway. A RAS pathway inhibitor inhibits signaling through the RAS pathway. Molecular targets of such agents include, but are not limited to: RAS, RAF, MEK, MAPK, ELK1, and the genes listed in the Table 1. Such agents are well known in the art and include, but are not limited to: RAS inhibitors ISIS 2503 and farnesyl transferase inhibitor R115777, L731735, SCH 66336, and BMS214662; Raf inhibitors ISIS 5132 and BAY43-9006; MEK inhibitors PD184322, CI-1040, and PD0325901 (reviewed in Dancey, 2002, Curr. Pharm. Des. 8:2259-2267; Sebolt-Leopold et al., 1999, Nat. Med. 5:810-816; Downward, 2003, Nat. Rev. Cancer 3:11-22; Barrett et al., 2008, Bioorg. Med. Chem. Lett. 18:6501-4).

[0113] In one embodiment, the method for measuring the effect or determining whether an agent modulates the RAS signaling pathway comprises: (1) comparing the level of expression of the biomarkers listed in Table 2a and 2b in a sample treated with an agent to the level of expression of the same biomarkers in a standard or control, wherein the standard or control levels represent those found in a vehicle-treated sample; and (2) determining whether the level of the biomarker-related polynucleotides in the treated sample is significantly different than that of the vehicle-treated control, wherein if no substantial difference is found, the agent is predicted not to modulate the RAS signaling pathway, and if a substantial difference is found, the agent is predicted to modulate the RAS signaling pathway.

[0114] The method can use the fullest of biomarkers (i.e., the complete set of biomarkers from Tables 2a and 2b). However, subsets of at least 10, 15, 20, 25, 30, 35, 40, 45, 50, 55, 60, 65, 70, 75, 80, 85,90, 95, 100, 105, 110, 115, 120, 125, 130, 135, or 140 of the 147 biomarkers may be used, wherein at least 1, 2, 3, 4, 5, 6, 7, 8, 9, 10, 11, 12, 13, 14, 15, 16, 17, 18, 19, 20, 21, 22, 23, 24, 25, 26, 27, 28, 29, 30, 31, 32, 33, 34, 35, 36, 37, 38, 39, 40, 41, or 42 biomarkers of each subset is selected from Table 2b. Alternatively, a subset of at least 3, 5, 10, 15, 20, 25, 30, 35, 40, 45, 50, 55, 60, 65, 70, 75, 80, 85, 90, 95, or 100 biomarkers, drawn from the “up” arm (see Table 2a) and a subset of at least 3, 5, 10, 15, 20, 25, 30, 35, or 40 biomarkers from the “down” arm (see Table 2b) can be used.

[0115] In another embodiment, the above method of measuring the effect of an agent on the RAS signaling pathway uses the two “arms” of the 147 biomarkers. The “up” arm comprises the 105 genes whose expression goes up with RAS pathway activation (see Table 2a), and the “down” arm comprises the 42 genes whose expression goes down with RAS pathway activation (see Table 2b). When comparing an individual sample with a standard or control, the expression value of gene X in the sample is compared to the expression value of gene X in the standard or control. For each gene in the set of biomarkers, a log(10) ratio is created for the expression value in the individual sample relative to the standard or control. A signature “score” is calculated by determining the mean log(10) ratio of the genes in the “up” arm and the subtracting the mean log(10) ratio of the genes in the “down” arm. If the signature score is above a pre-determined threshold, then the sample is considered to have deregulation of the RAS signaling pathway (i.e., the agent modulates the RAS signaling pathway). The pre-determined threshold may be 0, or may be the mean, median, or a percentile of signature scores of a collection of samples or a pooled sample used as a standard or control. To determine if this signature score is significant, an ANOVA calculation is performed (for example, a two tailed t-test, Wilcoxon rank-sum test, Kolmogorov-Smirnov test, etc.), in which the expression values of the genes in the two opposing arms are compared to one another. For example, if the two tailed t-test is used to determine whether the mean log(10) ratio of the genes in the “up” arm is significantly different than the mean log(10) ratio of the genes in the “down” arm, a p-value of <0.05 indicates that the signature in the individual sample is significantly different from the standard or control. In an alternative embodiment, a subset of at least 3, 5, 10, 15, 20, 25, 30, 35, 40, 45, 50, 55, 60, 65, 70, 75, 80, 85, 90, 95, or 100 biomarkers, drawn from the “up” arm (see Table 2a) and a subset of at least 3, 5, 10, 15, 20, 25, 30, 35, or 40 biomarkers from the “down” arm (see Table 2b) can be used may be used for calculating this signature score. It will be recognized by those skilled in the art that other differential expression values, besides log(10) ratio may be used for calculating a signature score, as long as the value represents an objective measurement of transcript abundance of the biomarker gene. Examples include, but are not limited to: xdev, error-weighted log(ratio), and mean subtracted log(intensity).

[0116] The above described methods of using the biomarker sets may also be used to rank order agents according to their effect on the biomarker sets or subsets. For example, agents may be ranked according to the change induced in differential expression value (for example, mean expression value of the biomarker set or subset or signature score) in the biomarker set or subsets. Candidate agents may also be ranked by comparison with agents known to modify the particular pathway in question.

### 3.4.4 Method of Measuring Pharmacodynamic Effect of an Agent

[0117] The invention provides a set of biomarkers useful for measuring the pharmacodynamic effect of an agent on the RAS signaling pathway. The biomarkers provided may be used to monitor modulation of the RAS signaling pathway at various time points following treatment with said agent in a patient or sample. Thus, the invention further provides a method for using these biomarkers as an early evaluation for efficacy of an agent which modulates the RAS signaling pathway. In one embodiment, the invention provides for a method of measuring pharmacodynamic effect of an agent that modulates the RAS signaling pathway in patient or sample comprising: (1) comparing the level of expression of the biomarkers listed in Table 2a and 2b in a sample treated with an agent to the level of expression of the same biomarkers in a standard or control, wherein the standard or control levels represent those found in a vehicle-treated sample; and (2) determining whether the level of the biomarker-related polynucleotides in the treated sample is significantly different than that of the vehicle-treated control, wherein if no substantial difference is found, the agent is predicted not to have an pharmacodynamic effect on the RAS signaling pathway, and if a substantial difference is found, the agent is predicted to have an pharmacodynamic effect on the RAS signaling pathway. The method can use the fullest of biomarkers (i.e., the complete set of biomarkers from Tables 2a and 2b). However, subsets of at least 10, 15, 20, 25, 30, 35, 40, 45, 50, 55, 60, 65, 70, 75, 80, 85,90, 95, 100, 105, 110, 115, 120, 125, 130, 135, or 140 of the 147 biomarkers may be used to monitor pharmacodynamic activity of an agent on the RAS signaling pathway, wherein at least 1, 2, 3, 4, 5, 6, 7, 8, 9, 10, 11, 12, 13, 14, 15, 16, 17, 18, 19, 20, 21, 22, 23, 24, 25, 26, 27, 28, 29, 30, 31, 32, 33, 34, 35, 36, 37, 38, 39, 40, 41, or 42 biomarkers of each subset is selected from Table 2b. Alternatively, a subset of at least 3, 5, 10, 15, 20, 25, 30, 35, 40, 45, 50, 55, 60, 65, 70, 75, 80, 85, 90, 95, or 100 biomarkers, drawn from the “up” arm (see Table 2a) and a subset of at least 3, 5, 10, 15, 20, 25, 30, 35, or 40 biomarkers from the “down” arm (see Table 2b) can be used to monitor pharmacodynamic activity of an agent on the RAS signaling pathway.

[0118] In another embodiment, the above method of measuring pharmacodynamic activity of an agent on the growth factor signaling pathway uses the two “arms” of the 147 biomarkers. The “up” arm comprises the 105 genes whose expression goes up with RAS pathway activation (see Table 2a), and the “down” arm comprises the 42 genes whose expression goes down with RAS pathway activation (see Table 2b). When comparing an individual sample with a standard or control, the expression value of gene X in the sample is compared to the expression value of gene X in the standard or control. For each gene in the set of biomarkers, a log(10) ratio is created for the expression value in the individual sample relative to the standard or control. A signature “score” is calculated by determining the mean log(10) ratio of the genes in the “up” arm and the subtracting the mean log(10) ratio of the genes in the “down” arm. If the signature score is above a pre-determined threshold, then the sample is considered to have deregulation of the growth factor signaling pathway. The pre-determined threshold may be 0, or may be the mean, median, or a percentile of signature scores of a collection of samples or a pooled sample used as a standard or control. To determine if this signature score is significant, an ANOVA calculation is performed (for example, a two tailed t-test, Wilcoxon rank-sum test, Kolmogorov-Smirnov test, etc.), in which the expression values of the genes in the two opposing arms are compared to one another. For example, if the two tailed t-test is used to determine whether the mean log(10) ratio of the genes in the “up” arm is significantly different than the mean log(10) ratio of the genes in the “down” arm, a p-value of <0.05 indicates that the signature in the individual sample is significantly different from the standard or control. Alternatively, a subset of at least 3, 5, 10, 15, 20, 25, 30, 35, 40, 45, 50, 55, 60, 65, 70, 75, 80, 85, 90, 95, or 100 biomarkers, drawn from the “up” arm (see Table 2a) and a subset of at least 3, 5, 10, 15, 20, 25, 30, 35, or 40 biomarkers from the “down” arm (see Table 2b) can be used may be used for calculating this signature score. It will be recognized by those skilled in the art that other differential expression values, besides log(10) ratio may be used for calculating a signature score, as long as the value represents an objective measurement of transcript abundance of the biomarker gene. Examples include, but are not limited to: xdev, error-weighted log(ratio), and mean subtracted log(intensity).

[0119] The use of the biomarkers is not restricted to measure the pharmacodynamic effect of an agent on the RAS signaling pathway for cancer-related conditions, and may be applied in a variety of phenotypes or conditions, clinical or experimental, in which gene expression plays a role. Where a set of biomarkers has been identified that corresponds to two or more phenotypes, the biomarker sets can be used to distinguish these phenotypes. For example, the phenotypes may be the diagnosis and/or prognosis of clinical states or phenotypes associated with cancers and other disease conditions, or other physiological conditions, prediction of response to agents that modulate pathways other than the RAS signaling pathway, wherein the expression level data is derived from a set of genes correlated with the particular physiological or disease condition.

### 3.4.5 Improving Sensitivity to Expression Level Differences

[0120] In using the biomarkers disclosed herein, and, indeed, using any sets of biomarkers to differentiate an individual or subject having one phenotype from another individual or subject having a second phenotype, one can compare the absolute expression of each of the biomarkers in a sample to a control; for example, the control can be the average level of expression of each of the biomarkers, respectively, in a pool of individuals or subjects. To increase the sensitivity of the comparison, however, the expression level values are preferably transformed in a number of ways.

[0121] For example, the expression level of each of the biomarkers can be normalized by the average expression level of all markers the expression level of which is determined, or by the average expression level of a set of control genes. Thus, in one embodiment, the biomarkers are represented by probes on a microarray, and the expression level of each of the biomarkers is normalized by the mean or median expression level across all of the genes represented on the microarray, including any non-biomarker genes. In a specific embodiment, the normalization is carried out by dividing the median or mean level of expression of all of the genes on the microarray. In another embodiment, the expression levels of the biomarkers are normalized by the mean or median level of expression of a set of control biomarkers. In a specific embodiment, the control biomarkers comprise a set of housekeeping genes. In another specific embodiment, the normalization is accomplished by dividing by the median or mean expression level of the control genes.

[0122] The sensitivity of a biomarker-based assay will also be increased if the expression levels of individual biomarkers are compared to the expression of the same biomarkers in a pool of samples. Preferably, the comparison is to the mean or median expression level of each the biomarker genes in the pool of samples. Such a comparison may be accomplished, for example, by dividing by the mean or median expression level of the pool for each of the biomarkers from the expression level each of the biomarkers in the sample. This has the effect of accentuating the relative differences in expression between biomarkers in the sample and markers in the pool as a whole, making comparisons more sensitive and more likely to produce meaningful results that the use of absolute expression levels alone. The expression level data may be transformed in any convenient way; preferably, the expression level data for all is log transformed before means or medians are taken.

[0123] In performing comparisons to a pool, two approaches may be used. First, the expression levels of the markers in the sample may be compared to the expression level of those markers in the pool, where nucleic acid derived from the sample and nucleic acid derived from the pool are hybridized during the course of a single experiment. Such an approach requires that new pool nucleic acid be generated for each comparison or limited numbers of comparisons, and is therefore limited by the amount of nucleic acid available. Alternatively, and preferably, the expression levels in a pool, whether normalized and/or transformed or not, are stored on a computer, or on computer-readable media, to be used in comparisons to the individual expression level data from the sample (i.e., single-channel data).

[0124] Thus, the current invention provides the following method of classifying a first cell or organism as having one of at least two different phenotypes, where the different phenotypes comprise a first phenotype and a second phenotype. The level of expression of each of a plurality of genes in a first sample from the first cell or organism is compared to the level of expression of each of said genes, respectively, in a pooled sample from a plurality of cells or organisms, the plurality of cells or organisms comprising different cells or organisms exhibiting said at least two different phenotypes, respectively, to produce a first compared value. The first compared value is then compared to a second compared value, wherein said second compared value is the product of a method comprising comparing the level of expression of each of said genes in a sample from a cell or organism characterized as having said first phenotype to the level of expression of each of said genes, respectively, in the pooled sample. The first compared value is then compared to a third compared value, wherein said third compared value is the product of a method comprising comparing the level of expression of each of the genes in a sample from a cell or organism characterized as having the second phenotype to the level of expression of each of the genes, respectively, in the pooled sample. Optionally, the first compared value can be compared to additional compared values, respectively, where each additional compared value is the product of a method comprising comparing the level of expression of each of said genes in a sample from a cell or organism characterized as having a phenotype different from said first and second phenotypes but included among the at least two different phenotypes, to the level of expression of each of said genes, respectively, in said pooled sample. Finally, a determination is made as to which of said second, third, and, if present, one or more additional compared values, said first compared value is most similar, wherein the first cell or organism is determined to have the phenotype of the cell or organism used to produce said compared value most similar to said first compared value.

[0125] In a specific embodiment of this method, the compared values are each ratios of the levels of expression of each of said genes. In another specific embodiment, each of the levels of expression of each of the genes in the pooled sample is normalized prior to any of the comparing steps. In a more specific embodiment, the normalization of the levels of expression is carried out by dividing by the median or mean level of the expression of each of the genes or dividing by the mean or median level of expression of one or more housekeeping genes in the pooled sample from said cell or organism. In another specific embodiment, the normalized levels of expression are subjected to a log transform, and the comparing steps comprise subtracting the log transform from the log of the levels of expression of each of the genes in the sample. In another specific embodiment, the two or more different phenotypes are different regulation status of the RAS signaling pathway. In still another specific embodiment, the two or more different phenotypes are different predicted responses to treatment with an agent that modulates the RAS signaling pathway. In yet another specific embodiment, the levels of expression of each of the genes, respectively, in the pooled sample or said levels of expression of each of said genes in a sample from the cell or organism characterized as having the first phenotype, second phenotype, or said phenotype different from said first and second phenotypes, respectively, are stored on a computer or on a computer-readable medium.

[0126] In another specific embodiment, the two phenotypes are deregulated or regulated RAS signaling pathway status. In another specific embodiment, the two phenotypes are predicted RAS signaling pathway-agent responder status. In yet another specific embodiment, the two phenotypes are pharmacodynamic effect and no pharmcodynamic effect of an agent on the RAS signaling pathway.

[0127] In another specific embodiment, the comparison is made between the expression of each of the genes in the sample and the expression of the same genes in a pool representing only one of two or more phenotypes. In the context of RAS signaling pathway status-correlated genes, for example, one can compare the expression levels of RAS signaling pathway regulation status-related genes in a sample to the average level of the expression of the same genes in a “deregulated” pool of samples (as opposed to a pool of samples that include samples from patients having regulated and deregulated RAS signaling pathway status). Thus, in this method, a sample is classified as having a deregulated RAS signaling pathway status if the level of expression of prognosis-correlated genes exceeds a chosen coefficient of correlation to the average “deregulated RAS signaling pathway” expression profile (i.e., the level of expression of RAS signaling pathway status-correlated genes in a pool of samples from patients having a “deregulated RAS signaling pathway status.” Patients or subjects whose expression levels correlate more poorly with the “deregulated RAS signaling pathway” expression profile (i.e., whose correlation coefficient fails to exceed the chosen coefficient) are classified as having a regulated RAS signaling pathway status.

[0128] Of course, single-channel data may also be used without specific comparison to a mathematical sample pool. For example, a sample may be classified as having a first or a second phenotype, wherein the first and second phenotypes are related, by calculating the similarity between the expression of at least 5 markers in the sample, where the markers are correlated with the first or second phenotype, to the expression of the same markers in a first phenotype template and a second phenotype template, by (a) labeling nucleic acids derived from a sample with a fluorophore to obtain a pool of fluorophore-labeled nucleic acids; (b) contacting said fluorophore-labeled nucleic acid with a microarray under conditions such that hybridization can occur, detecting at each of a plurality of discrete loci on the microarray a flourescent emission signal from said fluorophore-labeled nucleic acid that is bound to said microarray under said conditions; and (c) determining the similarity of marker gene expression in the individual sample to the first and second templates, wherein if said expression is more similar to the first template, the sample is classified as having the first phenotype, and if said expression is more similar to the second template, the sample is classified as having the second phenotype.

### 3.4.6 Methods for Classification of Expression Profiles

[0129] In preferred embodiments, the methods of the invention use a classifier for predicting RAS signaling pathway regulation status of a sample, predicting response to agents that modulate the RAS signaling pathway, assigning treatment to a subject, and/or measuring pharmacodynamic effect of an agent. The classifier can be based on any appropriate pattern recognition method that receives an input comprising a biomarker profile and provides an output comprising data indicating which patient subset the patient belongs. The classifier can be trained with training data from a training population of subjects. Typically, the training data comprise for each of the subjects in the training population a training marker profile comprising measurements of respective gene products of a plurality of genes in a suitable sample taken from the patient and outcome information, i.e., deregulated or regulated RAS signaling pathway status.

[0130] In preferred embodiments, the classifier can be based on a classification (pattern recognition) method described below, e.g., profile similarity; artificial neural network); support vector machine (SVM); logic regression, linear or quadratic discriminant analysis, decision trees, clustering, principal component analysis, nearest neighbor classifier analysis (described infra). Such classifiers can be trained with the training population using methods described in the relevant sections, infra.

[0131] The biomarker profile can be obtained by measuring the plurality of gene products in a cell sample from the subject using a method known in the art, e.g., a method described infra.

[0132] Various known statistical pattern recognition methods can be used in conjunction with the present invention. A classifier based on any of such methods can be constructed using the biomarker profiles and RAS pathway signalling status data of training patients. Such a classifier can then be used to evaluate the RAS pathway signalling status of a patient based on the patient's biomarker profile. The methods can also be used to identify biomarkers that discriminate between different RAS signalling pathway regulation status using a biomarker profile and RAS signalling pathway regulation data of training patients.

[0133] A. Profile Matching

[0134] A subject can be classified by comparing a biomarker profile obtained in a suitable sample from the subject with a biomarker profile that is representative of a particular phenotypic state. Such a marker profile is also termed a “template profile” or a “template.” The degree of similarity to such a template profile provides an evaluation of the subject's phenotype. If the degree of similarity of the subject marker profile and a template profile is above a predetermined threshold, the subject is assigned the classification represented by the template. For example, a subject's outcome prediction can be evaluated by comparing a biomarker profile of the subject to a predetermined template profile corresponding to a given phenotype or outcome, e.g., a RAS signalling pathway template comprising measurements of the plurality of biomarkers which are representative of levels of the biomarkers in a plurality of subjects that have tumors with deregulated RAS signalling pathway status.

[0135] In one embodiment, the similarity is represented by a correlation coefficient between the subject's profile and the template. In one embodiment, a correlation coefficient above a correlation threshold indicates a high similarity, whereas a correlation coefficient below the threshold indicates a low similarity.

[0136] In a specific embodiment, Pᵢ, measures the similarity between the subject's profile \vec{y} and a template profile comprising measurements of marker gene products representative of measurements of marker gene products in subjects having a particular outcome or phenotype, e.g., deregulated RAS signalling pathway status \vec{z}₁, or a regulated RAS signalling pathway status \vec{z}₂. Such a coefficient, Pᵢ, can be calculated using the following equation:

Pᵢ=(\vec{z}ᵢ·\vec{y})/∥\vec{z}ᵢ∥·\vec{y}∥)

where i designates the ith template. Thus, in one embodiment, \vec{y} is classified as a deregulated RAS signalling pathway profile if Pᵢ is greater than a selected correlation threshold. In another embodiment, \vec{y} is classified as a regulated RAS signalling pathway profile if P₂ is greater than a selected correlation threshold. In preferred embodiments, the correlation threshold is set as 0.3, 0.4, 0.5 or 0.6. In another embodiment, \vec{y} is classified as a deregulated RAS signalling pathway profile if Pᵢ is greater than P₂, whereas \vec{y} is classified as a regulated RAS signalling pathway profile if P₁ is less than P₂.

[0137] In another embodiment, the correlation coefficient is a weighted dot product of the patient's profile \vec{y} and a template profile, in which measurements of each different marker is assigned a weight.

[0138] In another embodiment, similarity between a patient's profile and a template is represented by a distance between the patient's profile and the template. In one embodiment, a distance below a given value indicates high similarity, whereas a distance equal to or greater than the given value indicates low similarity.

[0139] In one embodiment, the Euclidian distance according to the formula

Dᵢ=∥\vec{y}−\vec{z}ᵢ

is used, where Dᵢ measures the distance between the subject's profile \vec{y} and a template profile comprising measurements of marker gene products representative of measurements of marker gene products in subjects having a particular RAS signaling pathway regulation status, e.g., the deregulated RAS signaling pathway \vec{z}₁, or the regulated RAS signaling pathway template \vec{z}₂. In other embodiments, the Euclidian distance is squared to place progressively greater weight on cellular constituents that are further apart. In alternative embodiments, the distance measure Dᵢ, is the Manhattan distance provide by

$${D}_{i} = {\sum }_{n} \vert y ( n ) - {z}_{i} ( n ) \vert$$

[0140] where y(n) and zᵢ(n) are respectively measurements of the nth marker gene product in the subject's profile \vec{y} and a template profile.

[0141] In another embodiment, the distance is defined as Dᵢ=1−Pᵢ where Pᵢ, is the correlation coefficient or normalized dot product as described above.

[0142] In still other embodiments, the distance measure may be the Chebychev distance, the power distance, and percent disagreement, all of which are well known in the art.

[0143] B. Artificial Neural Network

[0144] In some embodiments, a neural network is used. A neural network can be constructed for a selected set of molecular markers of the invention. A neural network is a two-stage regression or classification model. A neural network has a layered structure that includes a layer of input units (and the bias) connected by a layer of weights to a layer of output units. For regression, the layer of output units typically includes just one output unit. However, neural networks can handle multiple quantitative responses in a seamless fashion.

[0145] In multilayer neural networks, there are input units (input layer), hidden units (hidden layer), and output units (output layer). There is, furthermore, a single bias unit that is connected to each unit other than the input units. Neural networks are described in Duda et al., 2001, Pattern Classification, Second Edition, John Wiley & Sons, Inc., New York; and Hastie et al., 2001, The Elements of Statistical Learning, Springer-Verlag, New York.

[0146] The basic approach to the use of neural networks is to start with an untrained network, present a training pattern, e.g., biomarker profiles from training patients, to the input layer, and to pass signals through the net and determine the output, e.g., the RAS signaling pathway regulation status in the training patients, at the output layer. These outputs are then compared to the target values; any difference corresponds to an error. This error or criterion function is some scalar function of the weights and is minimized when the network outputs match the desired outputs. Thus, the weights are adjusted to reduce this measure of error. For regression, this error can be sum-of-squared errors. For classification, this error can be either squared error or cross-entropy (deviation). See, e.g., Hastie et al., 2001, The Elements of Statistical Learning, Springer-Verlag, New York.

[0147] Three commonly used training protocols are stochastic, batch, and on-line. In stochastic training, patterns are chosen randomly from the training set and the network weights are updated for each pattern presentation. Multilayer nonlinear networks trained by gradient descent methods such as stochastic back-propagation perform a maximum-likelihood estimation of the weight values in the model defined by the network topology. In batch training, all patterns are presented to the network before learning takes place. Typically, in batch training, several passes are made through the training data. In online training, each pattern is presented once and only once to the net.

[0148] In some embodiments, consideration is given to starting values for weights. If the weights are near zero, then the operative part of the sigmoid commonly used in the hidden layer of a neural network (see, e.g., Hastie et al., 2001, The Elements of Statistical Learning, Springer-Verlag, New York) is roughly linear, and hence the neural network collapses into an approximately linear model. In some embodiments, starting values for weights are chosen to be random values near zero. Hence the model starts out nearly linear, and becomes nonlinear as the weights increase. Individual units localize to directions and introduce nonlinearities where needed. Use of exact zero weights leads to zero derivatives and perfect symmetry, and the algorithm never moves. Alternatively, starting with large weights often leads to poor solutions.

[0149] Since the scaling of inputs determines the effective scaling of weights in the bottom layer, it can have a large effect on the quality of the final solution. Thus, in some embodiments, at the outset all expression values are standardized to have mean zero and a standard deviation of one. This ensures all inputs are treated equally in the regularization process, and allows one to choose a meaningful range for the random starting weights. With standardization inputs, it is typical to take random uniform weights over the range [−0.7, +0.7].

[0150] A recurrent problem in the use of networks having a hidden layer is the optimal number of hidden units to use in the network. The number of inputs and outputs of a network are determined by the problem to be solved. In the present invention, the number of inputs for a given neural network can be the number of molecular markers in the selected set of molecular markers of the invention. The number of output for the neural network will typically be just one. However, in some embodiment more than one output is used so that more than just two states can be defined by the network. If too many hidden units are used in a neural network, the network will have too many degrees of freedom and is trained too long, there is a danger that the network will overfit the data. If there are too few hidden units, the training set cannot be learned. Generally speaking, however, it is better to have too many hidden units than too few. With too few hidden units, the model might not have enough flexibility to capture the nonlinearities in the data; with too many hidden units, the extra weight can be shrunk towards zero if appropriate regularization or pruning, as described below, is used. In typical embodiments, the number of hidden units is somewhere in the range of 5 to 100, with the number increasing with the number of inputs and number of training cases.

[0151] One general approach to determining the number of hidden units to use is to apply a regularization approach. In the regularization approach, a new criterion function is constructed that depends not only on the classical training error, but also on classifier complexity. Specifically, the new criterion function penalizes highly complex models; searching for the minimum in this criterion is to balance error on the training set with error on the training set plus a regularization term, which expresses constraints or desirable properties of solutions:

J=Jₚₐₜ+λJ_{reg}.

The parameter λ is adjusted to impose the regularization more or less strongly. In other words, larger values for λ will tend to shrink weights towards zero: typically cross-validation with a validation set is used to estimate λ. This validation set can be obtained by setting aside a random subset of the training population. Other forms of penalty can also be used, for example the weight elimination penalty (see, e.g., Hastie et al., 2001, The Elements of Statistical Learning, Springer-Verlag, New York).

[0152] Another approach to determine the number of hidden units to use is to eliminate—prune—weights that are least needed. In one approach, the weights with the smallest magnitude are eliminated (set to zero). Such magnitude-based pruning can work, but is nonoptimal; sometimes weights with small magnitudes are important for learning and training data. In some embodiments, rather than using a magnitude-based pruning approach, Wald statistics are computed. The fundamental idea in Wald Statistics is that they can be used to estimate the importance of a hidden unit (weight) in a model. Then, hidden units having the least importance are eliminated (by setting their input and output weights to zero). Two algorithms in this regard are the Optimal Brain Damage (OBD) and the Optimal Brain Surgeon (OBS) algorithms that use second-order approximation to predict how the training error depends upon a weight, and eliminate the weight that leads to the smallest increase in training error.

[0153] Optimal Brain Damage and Optimal Brain Surgeon share the same basic approach of training a network to local minimum error at weight w, and then pruning a weight that leads to the smallest increase in the training error. The predicted functional increase in the error for a change in full weight vector δw is:

$$δ J = {( \frac{\partial J}{\partial w} )}^{t} \cdot δ w + \frac{1}{2} δ {w}^{t} \cdot \frac{\partial {}^{2} J}{\partial {w}^{2}} \cdot δ w + O ( {‖ δ w ‖}^{3} )$$

$$\frac{\partial {}^{2} J}{\partial {w}^{2}}$$

where is the Hessian matrix. The first term vanishes because we are at a local minimum in error; third and higher order terms are ignored. The general solution for minimizing this function given the constraint of deleting one weight is:

$$δ w = - \frac{{w}_{q}}{{[ {H}^{- 1} ]}_{qq}} {H}^{- 1} \cdot {u}_{q} and {L}_{q} = \frac{1}{2} - \frac{{w}_{q}^{2}}{{[ {H}^{- 1} ]}_{qq}}$$

Here, u_{q} is the unit vector along the qth direction in weight space and L_{q} is approximation to the saliency of the weight q—the increase in training error if weight q is pruned and the other weights updated δw. These equations require the inverse of H. One method to calculate this inverse matrix is to start with a small value, H₀⁻¹=α⁻¹I, where α is a small parameter—effectively a weight constant. Next the matrix is updated with each pattern according to

$${H}_{m + 1}^{- 1} = {H}_{m}^{- 1} - \frac{{H}_{m}^{- 1} {X}_{m + 1} {X}_{m + 1}^{T} {H}_{m}^{- 1}}{\frac{n}{{a}_{m}} + {X}_{m + 1}^{T} {H}_{m}^{- 1} {X}_{m + 1}}$$

where the subscripts correspond to the pattern being presented and aₘ decreases with m. After the full training set has been presented, the inverse Hessian matrix is given by H⁻¹=Hₙ⁻¹. In algorithmic form, the Optimal Brain Surgeon method is:

```
begin initialize n_{H}, w, θ
    train a reasonably large network to minimum error
    do compute H⁻¹ by Eqn. 1
      $q * ← arg { min}_{q} {w}_{q}^{2} / ( {2 [ {H}^{- 1} ]}_{qq} ) ( saliency {L}_{q} )$
      $w ← w - \frac{{w}_{{q}^{*}}}{{[ {H}^{- 1} ]}_{{q}^{*} {q}^{*}}} {H}^{- 1} {e}_{{q}^{*}} ( saliency {L}_{q} )$
    until J(w) > θ
  return w
end
```

[0154] The Optimal Brain Damage method is computationally simpler because the calculation of the inverse Hessian matrix in line 3 is particularly simple for a diagonal matrix. The above algorithm terminates when the error is greater than a criterion initialized to be θ. Another approach is to change line 6 to terminate when the change in J(w) due to elimination of a weight is greater than some criterion value.

[0155] In some embodiments, a back-propagation neural network (see, for example Abdi, 1994, “A neural network primer”, J. Biol System. 2, 247-283) containing a single hidden layer of ten neurons (ten hidden units) found in EasyNN-Plus version 4.0 g software package (Neural Planner Software Inc.) is used. In a specific example, parameter values within the EasyNN-Plus program are set as follows: a learning rate of 0.05, and a momentum of 0.2. In some embodiments in which the EasyNN-Plus version 4.0 g software package is used, “outlier” samples are identified by performing twenty independently-seeded trials involving 20,000 learning cycles each.

[0156] C. Support Vector Machine

[0157] In some embodiments of the present invention, support vector machines (SVMs) are used to classify subjects using expression profiles of marker genes described in the present invention. General description of SVM can be found in, for example, Cristianini and Shawe-Taylor, 2000, An Introduction to Support Vector Machines, Cambridge University Press, Cambridge, Boser et al., 1992, “A training algorithm for optimal margin classifiers, in Proceedings of the 5^{th} Annual ACM Workshop on Computational Learning Theory, ACM Press, Pittsburgh, Pa., pp. 142-152; Vapnik, 1998, Statistical Learning Theory, Wiley, New York; Duda, Pattern Classification, Second Edition, 2001, John Wiley & Sons, Inc.; Hastie, 2001, The Elements of Statistical Learning, Springer, N.Y.; and Furey et al., 2000, Bioinformatics 16, 906-914. Applications of SVM in biological applications are described in Jaakkola et al., Proceedings of the 7^{th} International Conference on Intelligent Systems for Molecular Biology, AAAI Press, Menlo Park, Calif. (1999); Brown et al., Proc. Natl. Acad. Sci. 97(1):262-67 (2000); Zien et al., Bioinformatics, 16(9):799-807 (2000); Furey et al., Bioinformatics, 16(10):906-914 (2000)

[0158] In one approach, when a SVM is used, the gene expression data is standardized to have mean zero and unit variance and the members of a training population are randomly divided into a training set and a test set. For example, in one embodiment, two thirds of the members of the training population are placed in the training set and one third of the members of the training population are placed in the test set. The expression values for a selected set of genes of the present invention is used to train the SVM. Then the ability for the trained SVM to correctly classify members in the test set is determined. In some embodiments, this computation is performed several times for a given selected set of molecular markers. In each iteration of the computation, the members of the training population are randomly assigned to the training set and the test set. Then, the quality of the combination of molecular markers is taken as the average of each such iteration of the SVM computation.

[0159] Support vector machines map a given set of binary labeled training data to a high-dimensional feature space and separate the two classes of data with a maximum margin hyperplane. In general, this hyperplane corresponds to a nonlinear decision boundary in the input space. Let X ε R ⊂ [symbol] be the input vectors, y ε {−1,+1} be the labels, and φR₀→F be the mapping from input space to feature space. Then the SVM learning algorithm finds a hyperplane (w,b) such that the quantity

$$γ = {min}_{i} {y}_{i} \{ 〈 w , φ ( {X}_{i} ) 〉 - b \}$$

is maximized, where the vector w has the same dimensionality as F, b is a real number, and γ is called the margin. The corresponding decision function is then

f(X)=sign( [symbol] w,φ(X) [symbol] −b)

[0160] This minimum occurs when

$$w = {\sum }_{i} {α}_{i} {y}_{i} φ ( {X}_{i} )$$

where {αᵢ} are positive real numbers that maximize

$${\sum }_{i} {α}_{i} - {\sum }_{ij} {α}_{i} {α}_{j} {y}_{i} {y}_{j} 〈 φ ( {X}_{i} ) , φ ( {X}_{j} ) 〉$$

subject to

$${\sum }_{i} {α}_{i} {y}_{i} = 0 , {α}_{i} > 0$$

[0161] The decision function can equivalently be expressed as

$$f ( X ) = sign ( {\sum }_{i} {α}_{i} {y}_{i} 〈 φ ( {X}_{i} , φ ( X ) 〉 - b )$$

[0162] From this equation it can be seen that the αᵢ, associated with the training point Xᵢ, expresses the strength with which that point is embedded in the final decision function. A remarkable property of this alternative representation is that only a subset of the points will be associated with a non-zero αᵢ. These points are called support vectors and are the points that lie closest to the separating hyperplane. The sparseness of the α vector has several computational and learning theoretic consequences. It is important to note that neither the learning algorithm nor the decision function needs to represent explicitly the image of points in the feature space, φ(Xᵢ), since both use only the dot products between such images, (φ [symbol] Xᵢ),φ(Xⱼ) [symbol] . Hence, if one were given a function K(X, Y)= [symbol] φ(X),φ(X) [symbol] , one could learn and use the maximum margin hyperplane in the feature space without ever explicitly performing the mapping. For each continuous positive definite function K(X, Y) there exists a mapping 0 such that K(X, Y)= [symbol] φ(X), φ(X) [symbol] for all X, Y ε R₀ (Mercer's Theorem). The function K(X, Y) is called the kernel function. The use of a kernel function allows the support vector machine to operate efficiently in a nonlinear high-dimensional feature spaces without being adversely affected by the dimensionality of that space. Indeed, it is possible to work with feature spaces of infinite dimension. Moreover, Mercer's theorem makes it possible to learn in the feature space without even knowing φ and F. The matrix Kᵢⱼ= [symbol] φ(Xᵢ),φ(Xⱼ) [symbol] is called the kernel matrix. Finally, note that the learning algorithm is a quadratic optimization problem that has only a global optimum. The absence of local minima is a significant difference from standard pattern recognition techniques such as neural networks. For moderate sample sizes, the optimization problem can be solved with simple gradient descent techniques. In the presence of noise, the standard maximum margin algorithm described above can be subject to overfitting, and more sophisticated techniques should be used. This problem arises because the maximum margin algorithm always finds a perfectly consistent hypothesis and does not tolerate training error. Sometimes, however, it is necessary to trade some training accuracy for better predictive power. The need for tolerating training error has led to the development the soft-margin and the margin-distribution classifiers. One of these techniques replaces the kernel matrix in the training phase as follows:

K←K+λI

while still using the standard kernel function in the decision phase. By tuning k, one can control the training error, and it is possible to prove that the risk of misclassifying unseen points can be decreased with a suitable choice of λ.

[0163] If instead of controlling the overall training error one wants to control the trade-off between false positives and false negatives, it is possible to modify K as follows:

K←K+λD

where D is a diagonal matrix whose entries are either d⁺ or d⁻, in locations corresponding to positive and negative examples. It is possible to prove that this technique is equivalent to controlling the size of the αᵢ in a way that depends on the size of the class, introducing a bias for larger αᵢ in the class with smaller d. This in turn corresponds to an asymmetric margin; i.e., the class with smaller d will be kept further away from the decision boundary. In some cases, the extreme imbalance of the two classes, along with the presence of noise, creates a situation in which points from the minority class can be easily mistaken for mislabelled points. Enforcing a strong bias against training errors in the minority class provides protection against such errors and

$${d}^{+} = \frac{1}{{n}^{+}}$$

forces the SVM to make the positive examples support vectors. Thus, choosing and

$${d}^{-} = \frac{1}{{n}^{-}}$$

provides a heuristic way to automatically adjust the relative importance of the two classes, based on their respective cardinalities. This technique effectively controls the trade-off between sensitivity and specificity.

[0164] In the present invention, a linear kernel can be used. The similarity between two marker profiles X and Y can be the dot product X·Y. In one embodiment, the kernel is

K(X,Y)=X·Y+1

[0165] In another embodiment, a kernel of degree d is used

K(X,Y)=(X·Y+1)^{d},

Where d can be either 2, 3, . . . .

[0166] In still another embodiment, a Gaussian kernel is used

$$K ( X , Y ) = exp ( \frac{- {\vert X - Y \vert}^{2}}{2 {σ}^{2}} )$$

[0167] where σ is the width of the Gaussian.

[0168] D. Logistic Regression

[0169] In some embodiments, the classifier is based on a regression model, preferably a logistic regression model. Such a regression model includes a coefficient for each of the molecular markers in a selected set of molecular biomarkers of the invention. In such embodiments, the coefficients for the regression model are computed using, for example, a maximum likelihood approach. In particular embodiments, molecular biomarker data from two different classification or phenotype groups, e.g., deregulated or regulated RAS signaling pathway, response or non-response to treatment to an agent that modulates the RAS signaling pathway, is used and the dependent variable is the phenotypic status of the patient for which molecular marker characteristic data are from.

[0170] Some embodiments of the present invention provide generalizations of the logistic regression model that handle multicategory (polychotomous) responses. Such embodiments can be used to discriminate an organism into one or three or more classification groups, e.g., good, intermediate, and poor therapeutic response to treatment with RAS signaling pathway agents. Such regression models use multicategory logit models that simultaneously refer to all pairs of categories, and describe the odds of response in one category instead of another. Once the model specifies logits for a certain (J-1) pairs of categories, the rest are redundant. See, for example, Agresti, An Introduction to Categorical Data Analysis, John Wiley & Sons, Inc., 1996, New York, Chapter 8, which is hereby incorporated by reference.

[0171] E. Discriminant Analysis

[0172] Linear discriminant analysis (LDA) attempts to classify a subject into one of two categories based on certain object properties. In other words, LDA tests whether object attributes measured in an experiment predict categorization of the objects. LDA typically requires continuous independent variables and a dichotomous categorical dependent variable. In the present invention, the expression values for the selected set of molecular markers of the invention across a subset of the training population serve as the requisite continuous independent variables. The clinical group classification of each of the members of the training population serves as the dichotomous categorical dependent variable.

[0173] LDA seeks the linear combination of variables that maximizes the ratio of between-group variance and within-group variance by using the grouping information. Implicitly, the linear weights used by LDA depend on how the expression of a molecular biomarker across the training set separates in the two groups (e.g., a group that has deregulated RAS signaling pathway and a group that have regulated RAS signaling pathway status) and how this gene expression correlates with the expression of other genes. In some embodiments, LDA is applied to the data matrix of the N members in the training sample by K genes in a combination of genes described in the present invention. Then, the linear discriminant of each member of the training population is plotted. Ideally, those members of the training population representing a first subgroup (e.g. those subjects that have deregulated RAS signaling pathway status) will cluster into one range of linear discriminant values (e.g., negative) and those member of the training population representing a second subgroup (e.g. those subjects that have regulated RAS signaling pathway status) will cluster into a second range of linear discriminant values (e.g., positive). The LDA is considered more successful when the separation between the clusters of discriminant values is larger. For more information on linear discriminant analysis, see Duda, Pattern Classification, Second Edition, 2001, John Wiley & Sons, Inc; and Hastie, 2001, The Elements of Statistical Learning, Springer, N.Y.; Venables & Ripley, 1997, Modern Applied Statistics with s-plus, Springer, N.Y.

[0174] Quadratic discriminant analysis (QDA) takes the same input parameters and returns the same results as LDA. QDA uses quadratic equations, rather than linear equations, to produce results. LDA and QDA are interchangeable, and which to use is a matter of preference and/or availability of software to support the analysis. Logistic regression takes the same input parameters and returns the same results as LDA and QDA.

[0175] F. Decision Trees

[0176] In some embodiments of the present invention, decision trees are used to classify subjects using expression data for a selected set of molecular biomarkers of the invention. Decision tree algorithms belong to the class of supervised learning algorithms. The aim of a decision tree is to induce a classifier (a tree) from real-world example data. This tree can be used to classify unseen examples which have not been used to derive the decision tree.

[0177] A decision tree is derived from training data. An example contains values for the different attributes and what class the example belongs. In one embodiment, the training data is expression data for a combination of genes described in the present invention across the training population.

[0178] The following algorithm describes a decision tree derivation:

Tree (Examples, Class, Attributes)

Create a root node
If all Examples have the same Class value, give the root this label
Else if Attributes is empty label the root according to the most
common value
Else begin

Calculate the information gain for each attribute
Select the attribute A with highest information gain and make
this the root

attribute

For each possible value, v, of this attribute

Add a new branch below the root, corresponding to A = v
Let Examples(v) be those examples with A = v
If Examples(v) is empty, make the new branch a leaf node
labeled

| | |
|---|---|
| with the | most common value among Examples |

Else let the new branch be the tree created by

Tree(Examples(v),Class,Attributes - {A})

end

[0179] A more detailed description of the calculation of information gain is shown in the following. If the possible classes v, of the examples have probabilities P(vᵢ) then the information content I of the actual answer is given by:

$$I ( P ( {v}_{1} ) , … , P ( {v}_{n} ) ) = {\sum }_{i = 1}^{n} - P ( {v}_{i} ) {log}_{2} P ( {v}_{i} )$$

The I-value shows how much information we need in order to be able to describe the outcome of a classification for the specific dataset used. Supposing that the dataset contains p positive and n negative (examples (e.g. individuals), the information contained in a correct answer is:

$$I ( \frac{p}{p + n} , \frac{n}{p + n} ) = - \frac{p}{p + n} {log}_{2} \frac{p}{p + n} - \frac{n}{p + n} {log}_{2} \frac{n}{p + n}$$

where log₂ is the logarithm using base two. By testing single attributes the amount of information needed to make a correct classification can be reduced. The remainder for a specific attribute A (e.g. a gene biomarker) shows how much the information that is needed can be reduced.

$$Remainder ( A ) = {\sum }_{i = 1}^{v} \frac{{p}_{i} + {n}_{i}}{p + n} I ( \frac{{p}_{i}}{{p}_{i} + {n}_{i}} , \frac{{n}_{i}}{{p}_{i} + {n}_{i}} )$$

[0180] “v” is the number of unique attribute values for attribute A in a certain dataset, “i” is a certain attribute value, “pᵢ,” is the number of examples for attribute A where the classification is positive, “nᵢ” is the number of examples for attribute A where the classification is negative.

[0181] The information gain of a specific attribute A is calculated as the difference between the information content for the classes and the remainder of attribute A:

$$Gain ( A ) = I ( \frac{p}{p + n} , \frac{n}{p + n} ) - Remainder ( A )$$

The information gain is used to evaluate how important the different attributes are for the classification (how well they split up the examples), and the attribute with the highest information.

[0182] In general there are a number of different decision tree algorithms, many of which are described in Duda, Pattern Classification, Second Edition, 2001, John Wiley & Sons, Inc. Decision tree algorithms often require consideration of feature processing, impurity measure, stopping criterion, and pruning. Specific decision tree algorithms include, cut are not limited to classification and regression trees (CART), multivariate decision trees, ID3, and C4.5.

[0183] In one approach, when an exemplary embodiment of a decision tree is used, the gene expression data for a selected set of molecular markers of the invention across a training population is standardized to have mean zero and unit variance. The members of the training population are randomly divided into a training set and a test set. For example, in one embodiment, two thirds of the members of the training population are placed in the training set and one third of the members of the training population are placed in the test set. The expression values for a select combination of genes described in the present invention is used to construct the decision tree. Then, the ability for the decision tree to correctly classify members in the test set is determined. In some embodiments, this computation is performed several times for a given combination of molecular markers. In each iteration of the computation, the members of the training population are randomly assigned to the training set and the test set. Then, the quality of the combination of molecular markers is taken as the average of each such iteration of the decision tree computation.

[0184] G. Clustering

[0185] In some embodiments, the expression values for a selected set of molecular markers of the invention are used to cluster a training set. For example, consider the case in which ten gene biomarkers described in one of the genesets of the present invention are used. Each member m of the training population will have expression values for each of the ten biomarkers. Such values from a member m in the training population define the vector:

| | | | | | | | | | |
|---|---|---|---|---|---|---|---|---|---|
| X₁ₘ | X₂ₘ | X₃ₘ | X₄ₘ | X₅ₘ | X₆ₘ | X₇ₘ | X₈ₘ | X₉ₘ | X₁₀ₘ |

[0186] where Xᵢₘ, is the expression level of the i^{th} gene in organism m. If there are m organisms in the training set, selection of i genes will define m vectors. Note that the methods of the present invention do not require that each the expression value of every single gene used in the vectors be represented in every single vector m. In other words, data from a subject in which one of the i^{th} genes is not found can still be used for clustering. In such instances, the missing expression value is assigned either a “zero” or some other normalized value. In some embodiments, prior to clustering, the gene expression values are normalized to have a mean value of zero and unit variance.

[0187] Those members of the training population that exhibit similar expression patterns across the training group will tend to cluster together. A particular combination of genes of the present invention is considered to be a good classifier in this aspect of the invention when the vectors cluster into the trait groups found in the training population. For instance, if the training population includes patients with good or poor prognosis, a clustering classifier will cluster the population into two groups, with each group uniquely representing either a deregulated RAS signalling pathway status or a regulated RAS signalling pathway status.

[0188] Clustering is described on pages 211-256 of Duda and Hart, Pattern Classification and Scene Analysis, 1973, John Wiley & Sons, Inc., New York. As described in Section 6.7 of Duda, the clustering problem is described as one of finding natural groupings in a dataset. To identify natural groupings, two issues are addressed. First, a way to measure similarity (or dissimilarity) between two samples is determined. This metric (similarity measure) is used to ensure that the samples in one cluster are more like one another than they are to samples in other clusters. Second, a mechanism for partitioning the data into clusters using the similarity measure is determined.

[0189] Similarity measures are discussed in Section 6.7 of Duda, where it is stated that one way to begin a clustering investigation is to define a distance function and to compute the matrix of distances between all pairs of samples in a dataset. If distance is a good measure of similarity, then the distance between samples in the same cluster will be significantly less than the distance between samples in different clusters. However, as stated on page 215 of Duda, clustering does not require the use of a distance metric. For example, a nonmetric similarity function s(x, x′) can be used to compare two vectors x and x′. Conventionally, s(x, x′) is a symmetric function whose value is large when x and x′ are somehow “similar”. An example of a nonmetric similarity function s(x, x′) is provided on page 216 of Duda.

[0190] Once a method for measuring “similarity” or “dissimilarity” between points in a dataset has been selected, clustering requires a criterion function that measures the clustering quality of any partition of the data. Partitions of the data set that extremize the criterion function are used to cluster the data. See page 217 of Duda. Criterion functions are discussed in Section 6.8 of Duda.

[0191] More recently, Duda et al., Pattern Classification, 2^{nd} edition, John Wiley & Sons, Inc. New York, has been published. Pages 537-563 describe clustering in detail. More information on clustering techniques can be found in Kaufman and Rousseeuw, 1990, Finding Groups in Data: An Introduction to Cluster Analysis, Wiley, New York, N.Y.; Everitt, 1993, Cluster analysis (3d ed.), Wiley, New York, N.Y.; and Backer, 1995, Computer-Assisted Reasoning in Cluster Analysis, Prentice Hall, Upper Saddle River, N.J. Particular exemplary clustering techniques that can be used in the present invention include, but are not limited to, hierarchical clustering (agglomerative clustering using nearest-neighbor algorithm, farthest-neighbor algorithm, the average linkage algorithm, the centroid algorithm, or the sum-of-squares algorithm), k-means clustering, fuzzy k-means clustering algorithm, and Jarvis-Patrick clustering.

[0192] H. Principal Component Analysis

[0193] Principal component analysis (PCA) has been proposed to analyze gene expression data. Principal component analysis is a classical technique to reduce the dimensionality of a data set by transforming the data to a new set of variable (principal components) that summarize the features of the data. See, for example, Jolliffe, 1986, Principal Component Analysis, Springer, N.Y. Principal components (PCs) are uncorrelate and are ordered such that the k^{th} PC has the kth largest variance among PCs. The k^{th} PC can be interpreted as the direction that maximizes the variation of the projections of the data points such that it is orthogonal to the first k-1 PCs. The first few PCs capture most of the variation in the data set. In contrast, the last few PCs are often assumed to capture only the residual ‘noise’ in the data.

[0194] PCA can also be used to create a classifier in accordance with the present invention. In such an approach, vectors for a selected set of molecular biomarkers of the invention can be constructed in the same manner described for clustering above. In fact, the set of vectors, where each vector represents the expression values for the select genes from a particular member of the training population, can be considered a matrix. In some embodiments, this matrix is represented in a Free-Wilson method of qualitative binary description of monomers (Kubinyi, 1990, 3D QSAR in drug design theory methods and applications, Pergamon Press, Oxford, pp 589-638), and distributed in a maximally compressed space using PCA so that the first principal component (PC) captures the largest amount of variance information possible, the second principal component (PC) captures the second largest amount of all variance information, and so forth until all variance information in the matrix has been accounted for.

[0195] Then, each of the vectors (where each vector represents a member of the training population) is plotted. Many different types of plots are possible. In some embodiments, a one-dimensional plot is made. In this one-dimensional plot, the value for the first principal component from each of the members of the training population is plotted. In this form of plot, the expectation is that members of a first group will cluster in one range of first principal component values and members of a second group will cluster in a second range of first principal component values.

[0196] In one example, the training population comprises two classification groups. The first principal component is computed using the molecular biomarker expression values for the select genes of the present invention across the entire training population data set where the classification outcomes are known. Then, each member of the training set is plotted as a function of the value for the first principal component. In this example, those members of the training population in which the first principal component is positive represent one classification outcome and those members of the training population in which the first principal component is negative represent the other classification outcome.

[0197] In some embodiments, the members of the training population are plotted against more than one principal component. For example, in some embodiments, the members of the training population are plotted on a two-dimensional plot in which the first dimension is the first principal component and the second dimension is the second principal component. In such a two-dimensional plot, the expectation is that members of each subgroup represented in the training population will cluster into discrete groups. For example, a first cluster of members in the two-dimensional plot will represent subjects in the first classification group, a second cluster of members in the two-dimensional plot will represent subjects in the second classification group, and so forth.

[0198] In some embodiments, the members of the training population are plotted against more than two principal components and a determination is made as to whether the members of the training population are clustering into groups that each uniquely represents a subgroup found in the training population. In some embodiments, principal component analysis is performed by using the R mva package (Anderson, 1973, Cluster Analysis for applications, Academic Press, New York 1973; Gordon, Classification, Second Edition, Chapman and Hall, CRC, 1999.). Principal component analysis is further described in Duda, Pattern Classification, Second Edition, 2001, John Wiley & Sons, Inc.

[0199] I. Nearest Neighbor Classifier Analysis

[0200] Nearest neighbor classifiers are memory-based and require no model to be fit. Given a query point X₀, the k training points x₍ᵣ₎, k closest in distance to X₀ are identified and then the point X₀ is classified using the k nearest neighbors. Ties can be broken at random. In some embodiments, Euclidean distance in feature space is used to determine distance as:

dᵢ=∥x₍i)−xₒ∥.

[0201] Typically, when the nearest neighbor algorithm is used, the expression data used to compute the linear discriminant is standardized to have mean zero and variance 1. In the present invention, the members of the training population are randomly divided into a training set and a test set. For example, in one embodiment, two thirds of the members of the training population are placed in the training set and one third of the members of the training population are placed in the test set. Profiles of a selected set of molecular biomarkers of the invention represents the feature space into which members of the test set are plotted. Next, the ability of the training set to correctly characterize the members of the test set is computed. In some embodiments, nearest neighbor computation is performed several times for a given combination of genes of the present invention. In each iteration of the computation, the members of the training population are randomly assigned to the training set and the test set. Then, the quality of the combination of genes is taken as the average of each such iteration of the nearest neighbor computation.

[0202] The nearest neighbor rule can be refined to deal with issues of unequal class priors, differential misclassification costs, and feature selection. Many of these refinements involve some form of weighted voting for the neighbors. For more information on nearest neighbor analysis, see Duda, Pattern Classification, Second Edition, 2001, John Wiley & Sons, Inc; and Hastie, 2001, The Elements of Statistical Learning, Springer, N.Y.

### J. Evolutionary Methods

[0203] Inspired by the process of biological evolution, evolutionary methods of classifier design employ a stochastic search for an optimal classifier. In broad overview, such methods create several classifiers—a population—from measurements of gene products of the present invention. Each classifier varies somewhat from the other. Next, the classifiers are scored on expression data across the training population. In keeping with the analogy with biological evolution, the resulting (scalar) score is sometimes called the fitness. The classifiers are ranked according to their score and the best classifiers are retained (some portion of the total population of classifiers). Again, in keeping with biological terminology, this is called survival of the fittest. The classifiers are stochastically altered in the next generation—the children or offspring. Some offspring classifiers will have higher scores than their parent in the previous generation, some will have lower scores. The overall process is then repeated for the subsequent generation: The classifiers are scored and the best ones are retained, randomly altered to give yet another generation, and so on. In part, because of the ranking, each generation has, on average, a slightly higher score than the previous one. The process is halted when the single best classifier in a generation has a score that exceeds a desired criterion value. More information on evolutionary methods is found in, for example, Duda, Pattern Classification, Second Edition, 2001, John Wiley & Sons, Inc.

[0204] K. Bagging, Boosting and the Random Subspace Method

[0205] Bagging, boosting and the random subspace method are combining techniques that can be used to improve weak classifiers. These techniques are designed for, and usually applied to, decision trees. In addition, Skurichina and Duin provide evidence to suggest that such techniques can also be useful in linear discriminant analysis.

[0206] In bagging, one samples the training set, generating random independent bootstrap replicates, constructs the classifier on each of these, and aggregates them by a simple majority vote in the final decision rule. See, for example, Breiman, 1996, Machine Learning 24, 123-140; and Efron & Tibshirani, An Introduction to Bootstrap, Chapman & Hall, New York, 1993.

[0207] In boosting, classifiers are constructed on weighted versions of the training set, which are dependent on previous classification results. Initially, all objects have equal weights, and the first classifier is constructed on this data set. Then, weights are changed according to the performance of the classifier. Erroneously classified objects (molecular biomarkers in the data set) get larger weights, and the next classifier is boosted on the reweighted training set. In this way, a sequence of training sets and classifiers is obtained, which is then combined by simple majority voting or by weighted majority voting in the final decision. See, for example, Freund & Schapire, “Experiments with a new boosting algorithm,” Proceedings 13^{th} International Conference on Machine Learning, 1996, 148-156.

[0208] To illustrate boosting, consider the case where there are two phenotypic groups exhibited by the population under study, phenotype 1, and phenotype 2. Given a vector of molecular markers X, a classifier G(X) produces a prediction taking one of the type values in the two value set: phenotype 1, phenotype 2}. The error rate on the training sample is

$$\overline{err} = \frac{1}{N} {\sum }_{i = 1}^{N} I ( {y}_{i} \neq G ( {x}_{i} ) )$$

where N is the number of subjects in the training set (the sum total of the subjects that have either phenotype 1 or phenotype 2).

[0209] A weak classifier is one whose error rate is only slightly better than random guessing. In the boosting algorithm, the weak classification algorithm is repeatedly applied to modified versions of the data, thereby producing a sequence of weak classifiers Gₘ(x), m, =1, 2, . . . , M. The predictions from all of the classifiers in this sequence are then combined through a weighted majority vote to produce the final prediction:

$$G ( x ) = sign ( {\sum }_{m = 1}^{M} {α}_{m} {G}_{m} ( x ) )$$

Here α₁, α_{z}, α_{M} are computed by the boosting algorithm and their purpose is to weigh the contribution of each respective Gₘ(x). Their effect is to give higher influence to the more accurate classifiers in the sequence.

[0210] The data modifications at each boosting step consist of applying weights w₁, W₂, . . . wₙ to each of the training observations (xᵢ, yᵢ), i=1, 2, . . . , N. Initially all the weights are set to wᵢ=1/N, so that the first step simply trains the classifier on the data in the usual manner. For each successive iteration m=2, 3, . . . , M the observation weights are individually modified and the classification algorithm is reapplied to the weighted observations. At stem m, those observations that were misclassified by the classifier Gₘ₋₁(x) induced at the previous step have their weights increased, whereas the weights are decreased for those that were classified correctly. Thus as iterations proceed, observations that are difficult to correctly classify receive ever-increasing influence. Each successive classifier is thereby forced to concentrate on those training observations that are missed by previous ones in the sequence.

[0211] The exemplary boosting algorithm is summarized as follows:

```
1. Initialize the observation weights wᵢ = 1/N, i = 1, 2, . . . , N.
2. For m = 1 to M:
    (a) Fit a classifier Gₘ(x) to the training set using weights wᵢ.
    (b) Compute
        ${err}_{m} = \frac{{\sum }_{i = 1}^{N} {w}_{i} I ( {y}_{i} \neq {G}_{m} ( {x}_{i} ) )}{{\sum }_{i = 1}^{N} {w}_{i}}$
    (c) Compute αₘ = log((1-errₘ)/errₘ).
    (d) Set wᵢ ← wᵢ · exp[αₘ · I(yᵢ ≠ Gₘ(xᵢ))], i = 1, 2, . . . , N.
3. Output G(x) = sign └Σₘ₌₁^{M} αₘGₘ(x)┘
```

[0212] In the algorithm, the current classifier Gₘ(x) is induced on the weighted observations at line 2a. The resulting weighted error rate is computed at line 2b. Line 2c calculates the weight αₘ given to Gₘ(x) in producing the final classifier G(x) (line 3). The individual weights of each of the observations are updated for the next iteration at line 2d. Observations misclassified by Gₘ(x) have their weights scaled by a factor exp(αₘ), increasing their relative influence for inducing the next classifier Gₘ₊₁/(x) in the sequence. In some embodiments, modifications of the Freund and Schapire, 1997, Journal of Computer and System Sciences 55, pp. 119-139, boosting method are used. See, for example, Hasti et al., The Elements of Statistical Learning, 2001, Springer, N.Y., Chapter 10. In some embodiments, boosting or adaptive boosting methods are used.

[0213] In some embodiments, modifications of Freund and Schapire, 1997, Journal of Computer and System Sciences 55, pp. 119-139, are used. For example, in some embodiments, feature preselection is performed using a technique such as the nonparametric scoring methods of Park et al., 2002, Pac. Symp. Biocomput. 6, 52-63. Feature preselection is a form of dimensionality reduction in which the genes that discriminate between classifications the best are selected for use in the classifier. Then, the LogitBoost procedure introduced by Friedman et al., 2000, Ann Stat 28, 337-407 is used rather than the boosting procedure of Freund and Schapire. In some embodiments, the boosting and other classification methods of Ben-Dor et al., 2000, Journal of Computational Biology 7, 559-583 are used in the present invention. In some embodiments, the boosting and other classification methods of Freund and Schapire, 1997, Journal of Computer and System Sciences 55, 119-139, are used.

[0214] In the random subspace method, classifiers are constructed in random subspaces of the data feature space. These classifiers are usually combined by simple majority voting in the final decision rule. See, for example, Ho, “The Random subspace method for constructing decision forests,” IEEE Trans Pattern Analysis and Machine Intelligence, 1998; 20(8): 832-844.

[0215] L. Other Algorithms

[0216] The pattern classification and statistical techniques described above are merely examples of the types of models that can be used to construct a model for classification. Moreover, combinations of the techniques described above can be used. Some combinations, such as the use of the combination of decision trees and boosting, have been described. However, many other combinations are possible. In addition, in other techniques in the art such as Projection Pursuit and Weighted Voting can be used to construct a classifier.

### 3.5 DETERMINATION OF BIOMARKER GENE EXPRESSION LEVELS

### 3.5.1 Methods

[0217] The expression levels of the biomarker genes in a sample may be determined by any means known in the art. The expression level may be determined by isolating and determining the level (i.e., amount) of nucleic acid transcribed from each biomarker gene. Alternatively, or additionally, the level of specific proteins translated from mRNA transcribed from a biomarker gene may be determined.

[0218] The level of expression of specific biomarker genes can be accomplished by determining the amount of mRNA, or polynucleotides derived therefrom, present in a sample. Any method for determining RNA levels can be used. For example, RNA is isolated from a sample and separated on an agarose gel. The separated RNA is then transferred to a solid support, such as a filter. Nucleic acid probes representing one or more biomarkers are then hybridized to the filter by northern hybridization, and the amount of biomarker-derived RNA is determined Such determination can be visual, or machine-aided, for example, by use of a densitometer. Another method of determining RNA levels is by use of a dot-blot or a slot-blot. In this method, RNA, or nucleic acid derived therefrom, from a sample is labeled. The RNA or nucleic acid derived therefrom is then hybridized to a filter containing oligonucleotides derived from one or more biomarker genes, wherein the oligonucleotides are placed upon the filter at discrete, easily-identifiable locations. Hybridization, or lack thereof, of the labeled RNA to the filter-bound oligonucleotides is determined visually or by densitometer. Polynucleotides can be labeled using a radiolabel or a fluorescent (i.e., visible) label.

[0219] These examples are not intended to be limiting. Other methods of determining RNA abundance are known in the art, including, but not limited to quantitative PCR methods, such as TAQMAN®, and Nanostring's NCOUNTERT™ Digital Gene Expression System (Seattle, Wash.) (See also WO2007076128; WO2007076129).

[0220] The level of expression of particular biomarker genes may also be assessed by determining the level of the specific protein expressed from the biomarker genes. This can be accomplished, for example, by separation of proteins from a sample on a polyacrylamide gel, followed by identification of specific biomarker-derived proteins using antibodies in a western blot. Alternatively, proteins can be separated by two-dimensional gel electrophoresis systems. Two-dimensional gel electrophoresis is well-known in the art and typically involves isoelectric focusing along a first dimension followed by SDS-PAGE electrophoresis along a second dimension. See, e.g., Hames et al, 1990, GEL ELECTROPHORESIS OF PROTEINS: A PRACTICAL APPROACH, IRL Press, New York; Shevchenko et al., Proc. Nat'l Acad. Sci. USA 93:1440-1445 (1996); Sagliocco et al., Yeast 12:1519-1533 (1996); Lander, Science 274:536-539 (1996). The resulting electropherograms can be analyzed by numerous techniques, including mass spectrometric techniques, western blotting and immunoblot analysis using polyclonal and monoclonal antibodies.

[0221] Alternatively, biomarker-derived protein levels can be determined by constructing an antibody microarray in which binding sites comprise immobilized, preferably monoclonal, antibodies specific to a plurality of protein species encoded by the cell genome. Preferably, antibodies are present for a substantial fraction of the biomarker-derived proteins of interest. Methods for making monoclonal antibodies are well known (see, e.g., Harlow and Lane, 1988, ANTIBODIES: A LABORATORY MANUAL, Cold Spring Harbor, N.Y., which is incorporated in its entirety for all purposes). In one embodiment, monoclonal antibodies are raised against synthetic peptide fragments designed based on genomic sequence of the cell. With such an antibody array, proteins from the cell are contacted to the array, and their binding is assayed with assays known in the art. Generally, the expression, and the level of expression, of proteins of diagnostic or prognostic interest can be detected through immunohistochemical staining of tissue slices or sections.

[0222] Finally, expression of biomarker genes in a number of tissue specimens may be characterized using a “tissue array” (Kononen et al., Nat. Med. 4(7):844-7 (1998)). In a tissue array, multiple tissue samples are assessed on the same microarray. The arrays allow in situ detection of RNA and protein levels; consecutive sections allow the analysis of multiple samples simultaneously.

### 3.5.2 Microarrays

[0223] In preferred embodiments, polynucleotide microarrays are used to measure expression so that the expression status of each of the biomarkers above is assessed simultaneously. In a specific embodiment, the invention provides for oligonucleotide or cDNA arrays comprising probes hybridizable to the genes corresponding to each of the biomarker sets described above (i.e., biomarkers to determine the molecular type or subtype of a tumor; biomarkers to classify the RAS pathway signaling status of a tumor; biomarkers to predict response of a subject to a compound that modulates the RAS signaling pathway; biomarkers to measure pharmacodynamic effect of a therapeutic agent on the RAS signaling pathway).

[0224] The microarrays provided by the present invention may comprise probes hybridizable to the genes corresponding to biomarkers able to distinguish the status of one, two, or all three of the clinical conditions noted above. In particular, the invention provides polynucleotide arrays comprising probes to a subset or subsets of at least 5, 10, 20, 30, 40, 50, 60, 70, 80, 90, 100, 110, 120, 130, 140 genetic biomarkers, up to the full set of 147 biomarkers of Tables 2a and 2b, which distinguish RAS signaling pathway deregulated and regulated patients or tumors.

[0225] For example, in a specific embodiment, the microarray is a screening or scanning array as described in Altschuler et al., International Publication WO 02/18646, published Mar. 7, 2002 and Scherer et al., International Publication WO 02/16650, published Feb. 28, 2002. The scanning and screening arrays comprise regularly-spaced, positionally-addressable probes derived from genomic nucleic acid sequence, both expressed and unexpressed. Such arrays may comprise probes corresponding to a subset of, or all of, the biomarkers listed in Tables 2a and 2b, or a subset thereof as described above, and can be used to monitor biomarker expression in the same way as a microarray containing only biomarkers listed in Table 2a and 2b.

[0226] In yet another specific embodiment, the microarray is a commercially-available cDNA microarray that comprises at least five of the biomarkers listed in Tables 2a and 2b, wherein at least 1 biomarker is selected from Table 2b. Preferably, a commercially-available cDNA microarray comprises all of the biomarkers listed in Tables 2a and 2b. However, such a microarray may comprise 5, 10, 15, 25, 50, 75, 100, 125, 140 or more of the biomarkers in any of Tables 2a and 2b, up to the maximum number of biomarkers in Tables 2a and 2b, and may comprise all of the biomarkers in any one of Table 2a and 2b and a subset of another of Table 2a and 2b, or subsets of each as described above. In a specific embodiment of the microarrays used in the methods disclosed herein, the biomarkers that are all or a portion of Tables 2a and 2b make up at least 50%, 60%, 70%, 80%, 90%, 95% or 98% of the probes on the microarray.

[0227] General methods pertaining to the construction of microarrays comprising the biomarker sets and/or subsets above are described in the following sections.

### 3.5.2.1 Construction of Microarrays

[0228] Microarrays are prepared by selecting probes which comprise a polynucleotide sequence, and then immobilizing such probes to a solid support or surface. For example, the probes may comprise DNA sequences, RNA sequences, or copolymer sequences of DNA and RNA. The polynucleotide sequences of the probes may also comprise DNA and/or RNA analogues, or combinations thereof. For example, the polynucleotide sequences of the probes may be full or partial fragments of genomic DNA. The polynucleotide sequences of the probes may also be synthesized nucleotide sequences, such as synthetic oligonucleotide sequences. The probe sequences can be synthesized either enzymatically in vivo, enzymatically in vitro (e.g., by PCR), or non-enzymatically in vitro.

[0229] The probe or probes used in the methods of the invention are preferably immobilized to a solid support which may be either porous or non-porous. For example, the probes of the invention may be polynucleotide sequences which are attached to a nitrocellulose or nylon membrane or filter covalently at either the 3′ or the 5′ end of the polynucleotide. Such hybridization probes are well known in the art (see, e.g., Sambrook et al., MOLECULAR CLONING—A LABORATORY MANUAL (2ND ED.), Vols. 1-3, Cold Spring Harbor Laboratory, Cold Spring Harbor, N.Y. (1989). Alternatively, the solid support or surface may be a glass or plastic surface. In a particularly preferred embodiment, hybridization levels are measured to microarrays of probes consisting of a solid phase on the surface of which are immobilized a population of polynucleotides, such as a population of DNA or DNA mimics, or, alternatively, a population of RNA or RNA mimics The solid phase may be a nonporous or, optionally, a porous material such as a gel.

[0230] In preferred embodiments, a microarray comprises a support or surface with an ordered array of binding (e.g., hybridization) sites or “probes” each representing one of the biomarkers described herein. Preferably the microarrays are addressable arrays, and more preferably positionally addressable arrays. More specifically, each probe of the array is preferably located at a known, predetermined position on the solid support such that the identity (i.e., the sequence) of each probe can be determined from its position in the array (i.e., on the support or surface). In preferred embodiments, each probe is covalently attached to the solid support at a single site.

[0231] Microarrays can be made in a number of ways, of which several are described below. However produced, microarrays share certain characteristics. The arrays are reproducible, allowing multiple copies of a given array to be produced and easily compared with each other. Preferably, microarrays are made from materials that are stable under binding (e.g., nucleic acid hybridization) conditions. The microarrays are preferably small, e.g., between 1 cm² and 25 cm², between 12 cm² and 13 cm², or 3 cm². However, larger arrays are also contemplated and may be preferable, e.g., for use in screening arrays. Preferably, a given binding site or unique set of binding sites in the microarray will specifically bind (e.g., hybridize) to the product of a single gene in a cell (e.g., to a specific mRNA, or to a specific cDNA derived therefrom). However, in general, other related or similar sequences will cross hybridize to a given binding site.

[0232] The microarrays of the present invention include one or more test probes, each of which has a polynucleotide sequence that is complementary to a subsequence of RNA or DNA to be detected. Preferably, the position of each probe on the solid surface is known. Indeed, the microarrays are preferably positionally addressable arrays. Specifically, each probe of the array is preferably located at a known, predetermined position on the solid support such that the identity (i.e., the sequence) of each probe can be determined from its position on the array (i.e., on the support or surface).

[0233] According to the invention, the microarray is an array (i.e., a matrix) in which each position represents one of the biomarkers described herein. For example, each position can contain a DNA or DNA analogue based on genomic DNA to which a particular RNA or cDNA transcribed from that genetic biomarker can specifically hybridize. The DNA or DNA analogue can be, e.g., a synthetic oligomer or a gene fragment. In one embodiment, probes representing each of the biomarkers is present on the array.

### 3.5.2.2 Preparing Probes for Microarrays

[0234] As noted above, the “probe” to which a particular polynucleotide molecule specifically hybridizes according to the invention contains a complementary genomic polynucleotide sequence. The probes of the microarray preferably consist of nucleotide sequences of no more than 1,000 nucleotides. In some embodiments, the probes of the array consist of nucleotide sequences of 10 to 1,000 nucleotides. In a preferred embodiment, the nucleotide sequences of the probes are in the range of 10-200 nucleotides in length and are genomic sequences of a species of organism, such that a plurality of different probes is present, with sequences complementary and thus capable of hybridizing to the genome of such a species of organism, sequentially tiled across all or a portion of such genome. In other specific embodiments, the probes are in the range of 10-30 nucleotides in length, in the range of 10-40 nucleotides in length, in the range of 20-50 nucleotides in length, in the range of 40-80 nucleotides in length, in the range of 50-150 nucleotides in length, in the range of 80-120 nucleotides in length, and most preferably are 60 nucleotides in length.

[0235] The probes may comprise DNA or DNA “mimics” (e.g., derivatives and analogues) corresponding to a portion of an organism's genome. In another embodiment, the probes of the microarray are complementary RNA or RNA mimics DNA mimics are polymers composed of subunits capable of specific, Watson-Crick-like hybridization with DNA, or of specific hybridization with RNA. The nucleic acids can be modified at the base moiety, at the sugar moiety, or at the phosphate backbone. Exemplary DNA mimics include, e.g., phosphorothioates.

[0236] DNA can be obtained, e.g., by polymerase chain reaction (PCR) amplification of genomic DNA or cloned sequences. PCR primers are preferably chosen based on a known sequence of the genome that will result in amplification of specific fragments of genomic DNA. Computer programs that are well known in the art are useful in the design of primers with the required specificity and optimal amplification properties, such as Oligo version 5.0 (National Biosciences). Typically each probe on the microarray will be between 10 bases and 50,000 bases, usually between 300 bases and 1,000 bases in length. PCR methods are well known in the art, and are described, for example, in Innis et al., eds., PCR PROTOCOLS: A GUIDE TO METHODS AND APPLICATIONS, Academic Press Inc., San Diego, Calif. (1990). It will be apparent to one skilled in the art that controlled robotic systems are useful for isolating and amplifying nucleic acids.

[0237] An alternative, preferred means for generating the polynucleotide probes of the microarray is by synthesis of synthetic polynucleotides or oligonucleotides, e.g., using N-phosphonate or phosphoramidite chemistries (Froehler et al., Nucleic Acid Res. 14:5399-5407 (1986); McBride et al., Tetrahedron Lett. 24:246-248 (1983)). Synthetic sequences are typically between about 10 and about 500 bases in length, more typically between about 20 and about 100 bases, and most preferably between about 40 and about 70 bases in length. In some embodiments, synthetic nucleic acids include non-natural bases, such as, but by no means limited to, inosine. As noted above, nucleic acid analogues may be used as binding sites for hybridization. An example of a suitable nucleic acid analogue is peptide nucleic acid (see, e.g., Egholm et al., Nature 363:566-568 (1993); U.S. Pat. No. 5,539,083). Probes are preferably selected using an algorithm that takes into account binding energies, base composition, sequence complexity, cross-hybridization binding energies, and secondary structure (see Friend et al., International Patent Publication WO 01/05935, published Jan. 25, 2001; Hughes et al., Nat. Biotech. 19:342-7 (2001)).

[0238] A skilled artisan will also appreciate that positive control probes, e.g., probes known to be complementary and hybridizable to sequences in the target polynucleotide molecules, and negative control probes, e.g., probes known to not be complementary and hybridizable to sequences in the target polynucleotide molecules, should be included on the array. In one embodiment, positive controls are synthesized along the perimeter of the array. In another embodiment, positive controls are synthesized in diagonal stripes across the array. In still another embodiment, the reverse complement for each probe is synthesized next to the position of the probe to serve as a negative control. In yet another embodiment, sequences from other species of organism are used as negative controls or as “spike-in” controls.

### 3.5.2.3 Attaching Probes to the Solid Surface

[0239] The probes are attached to a solid support or surface, which may be made, e.g., from glass, plastic (e.g., polypropylene, nylon), polyacrylamide, nitrocellulose, gel, or other porous or nonporous material. A preferred method for attaching the nucleic acids to a surface is by printing on glass plates, as is described generally by Schena et al, Science 270:467-470 (1995). This method is especially useful for preparing microarrays of cDNA (See also, DeRisi et al, Nature Genetics 14:457-460 (1996); Shalon et al., Genome Res. 6:639-645 (1996); and Schena et al., Proc. Natl. Acad. Sci. U.S.A. 93:10539-11286 (1995)).

[0240] A second preferred method for making microarrays is by making high-density oligonucleotide arrays. Techniques are known for producing arrays containing thousands of oligonucleotides complementary to defined sequences, at defined locations on a surface using photolithographic techniques for synthesis in situ (see, Fodor et al., 1991, Science 251:767-773; Pease et al, 1994, Proc. Natl. Acad. Sci. U.S.A. 91:5022-5026; Lockhart et al., 1996, Nature Biotechnology 14:1675; U.S. Pat. Nos. 5,578,832; 5,556,752; and 5,510,270) or other methods for rapid synthesis and deposition of defined oligonucleotides (Blanchard et al., Biosensors & Bioelectronics 11:687-690). When these methods are used, oligonucleotides (e.g., 60-mers) of known sequence are synthesized directly on a surface such as a derivatized glass slide. Usually, the array produced is redundant, with several oligonucleotide molecules per RNA.

[0241] Other methods for making microarrays, e.g., by masking (Maskos and Southern, 1992, Nuc. Acids. Res. 20:1679-1684), may also be used. In principle, and as noted supra, any type of array, for example, dot blots on a nylon hybridization membrane (see Sambrook et al., MOLECULAR CLONING—A LABORATORY MANUAL (2ND ED.), Vols. 1-3, Cold Spring Harbor Laboratory, Cold Spring Harbor, N.Y. (1989)) could be used. However, as will be recognized by those skilled in the art, very small arrays will frequently be preferred because hybridization volumes will be smaller.

[0242] In one embodiment, the arrays of the present invention are prepared by synthesizing polynucleotide probes on a support. In such an embodiment, polynucleotide probes are attached to the support covalently at either the 3′ or the 5′ end of the polynucleotide.

[0243] In a particularly preferred embodiment, microarrays of the invention are manufactured by means of an ink jet printing device for oligonucleotide synthesis, e.g., using the methods and systems described by Blanchard in U.S. Pat. No. 6,028,189; Blanchard et al., 1996, Biosensors and Bioelectronics 11:687-690; Blanchard, 1998, in SYNTHETIC DNA ARRAYS IN GENETIC ENGINEERING, Vol. 20, J. K. Setlow, Ed., Plenum Press, New York at pages 111-123. Specifically, the oligonucleotide probes in such microarrays are preferably synthesized in arrays, e.g., on a glass slide, by serially depositing individual nucleotide bases in “microdroplets” of a high surface tension solvent such as propylene carbonate. The microdroplets have small volumes (e.g., 100 pL or less, more preferably 50 pL or less) and are separated from each other on the microarray (e.g., by hydrophobic domains) to form circular surface tension wells which define the locations of the array elements (i.e., the different probes). Microarrays manufactured by this ink-jet method are typically of high density, preferably having a density of at least about 2,500 different probes per 1 cm². The polynucleotide probes are attached to the support covalently at either the 3′ or the 5′ end of the polynucleotide.

### 3.5.2.4 Target Polynucleotide Molecules

[0244] The polynucleotide molecules which may be analyzed by the present invention (the “target polynucleotide molecules”) may be from any clinically relevant source, but are expressed RNA or a nucleic acid derived therefrom (e.g., cDNA or amplified RNA derived from cDNA that incorporates an RNA polymerase promoter), including naturally occurring nucleic acid molecules, as well as synthetic nucleic acid molecules. In one embodiment, the target polynucleotide molecules comprise RNA, including, but by no means limited to, total cellular RNA, poly(A)+messenger RNA (mRNA) or fraction thereof, cytoplasmic mRNA, or RNA transcribed from cDNA (i.e., cRNA; see, e.g., Linsley & Schelter, U.S. patent application Ser. No. 09/411,074, filed Oct. 4, 1999, or U.S. Pat. Nos. 5,545,522, 5,891,636, or 5,716,785). Methods for preparing total and poly(A)+ RNA are well known in the art, and are described generally, e.g., in Sambrook et al., MOLECULAR CLONING—A LABORATORY MANUAL (2ND ED.), Vols. 1-3, Cold Spring Harbor Laboratory, Cold Spring Harbor, N.Y. (1989). In one embodiment, RNA is extracted from cells of the various types of interest in this invention using guanidinium thiocyanate lysis followed by CsCl centrifugation (Chirgwin et al., 1979, Biochemistry 18:5294-5299). In another embodiment, total RNA is extracted using a silica gel-based column, commercially available examples of which include RNeasy (Qiagen, Valencia, Calif.) and StrataPrep (Stratagene, La Jolla, Calif.). In an alternative embodiment, which is preferred for S. cerevisiae, RNA is extracted from cells using phenol and chloroform, as described in Ausubel et al., eds., 1989, CURRENT PROTOCOLS 1N MOLECULAR BIOLOGY, Vol. III, Green Publishing Associates, Inc., John Wiley & Sons, Inc., New York, at pp. 13.12.1-13.12.5). Poly(A)+ RNA can be selected, e.g., by selection with oligo-dT cellulose or, alternatively, by oligo-dT primed reverse transcription of total cellular RNA. In one embodiment, RNA can be fragmented by methods known in the art, e.g., by incubation with ZnCl₂, to generate fragments of RNA. In another embodiment, the polynucleotide molecules analyzed by the invention comprise cDNA, or PCR products of amplified RNA or cDNA.

[0245] In one embodiment, total RNA, mRNA, or nucleic acids derived therefrom, is isolated from a sample taken from a person afflicted with breast cancer. Target polynucleotide molecules that are poorly expressed in particular cells may be enriched using normalization techniques (Bonaldo et al., 1996, Genome Res. 6:791-806).

[0246] As described above, the target polynucleotides are detectably labeled at one or more nucleotides. Any method known in the art may be used to detectably label the target polynucleotides. Preferably, this labeling incorporates the label uniformly along the length of the RNA, and more preferably, the labeling is carried out at a high degree of efficiency. One embodiment for this labeling uses oligo-dT primed reverse transcription to incorporate the label; however, conventional methods of this method are biased toward generating 3′ end fragments. Thus, in a preferred embodiment, random primers (e.g., 9-mers) are used in reverse transcription to uniformly incorporate labeled nucleotides over the fill length of the target polynucleotides. Alternatively, random primers may be used in conjunction with PCR methods or T7 promoter-based in vitro transcription methods in order to amplify the target polynucleotides.

[0247] In a preferred embodiment, the detectable label is a luminescent label. For example, fluorescent labels, bio-luminescent labels, chemi-luminescent labels, and colorimetric labels may be used in the present invention. In a highly preferred embodiment, the label is a fluorescent label, such as a fluorescein, a phosphor, a rhodamine, or a polymethine dye derivative. Examples of commercially available fluorescent labels include, for example, fluorescent phosphoramidites such as FluorePrime (Amersham Pharmacia, Piscataway, N.J.), Fluoredite (Millipore, Bedford, Mass.), FAM (ABI, Foster City, Calif.), and Cy3 or Cy5 (Amersham Pharmacia, Piscataway, N.J.). In another embodiment, the detectable label is a radiolabeled nucleotide.

[0248] In a further preferred embodiment, target polynucleotide molecules from a patient sample are labeled differentially from target polynucleotide molecules of a standard. The standard can comprise target polynucleotide molecules from normal individuals (i.e., those not afflicted with cancer). In a highly preferred embodiment, the standard comprises target polynucleotide molecules pooled from samples from normal individuals or tumor samples from individuals having cancer. In another embodiment, the target polynucleotide molecules are derived from the same individual, but are taken at different time points, and thus indicate the efficacy of a treatment by a change in expression of the biomarkers, or lack thereof during and after the course of treatment (i.e., RAS pathway therapeutic agent), wherein a change in the expression of the biomarkers from a RAS pathway deregulation pattern to a RAS pathway regulation pattern indicates that the treatment is efficacious. In this embodiment, different timepoints are differentially labeled.

### 3.5.2.5 Hybridization to Microarrays

[0249] Nucleic acid hybridization and wash conditions are chosen so that the target polynucleotide molecules specifically bind or specifically hybridize to the complementary polynucleotide sequences of the array, preferably to a specific array site, wherein its complementary DNA is located.

[0250] Arrays containing double-stranded probe DNA situated thereon are preferably subjected to denaturing conditions to render the DNA single-stranded prior to contacting with the target polynucleotide molecules. Arrays containing single-stranded probe DNA (e.g., synthetic oligodeoxyribonucleic acids) may need to be denatured prior to contacting with the target polynucleotide molecules, e.g., to remove hairpins or dimers which form due to self complementary sequences.

[0251] Optimal hybridization conditions will depend on the length (e.g., oligomer versus polynucleotide greater than 200 bases) and type (e.g., RNA, or DNA) of probe and target nucleic acids. One of skill in the art will appreciate that as the oligonucleotides become shorter, it may become necessary to adjust their length to achieve a relatively uniform melting temperature for satisfactory hybridization results. General parameters for specific (i.e., stringent) hybridization conditions for nucleic acids are described in Sambrook et al., MOLECULAR CLONING—A LABORATORY MANUAL (2ND ED.), Vols. 1-3, Cold Spring Harbor Laboratory, Cold Spring Harbor, N.Y. (1989), and in Ausubel et al., CURRENT PROTOCOLS IN MOLECULAR BIOLOGY, vol. 2, Current Protocols Publishing, New York (1994). Typical hybridization conditions for the cDNA microarrays of Schena et al. are hybridization in 5×SSC plus 0.2% SDS at 65° C. for four hours, followed by washes at 25° C. in low stringency wash buffer (1×SSC plus 0.2% SDS), followed by 10 minutes at 25° C. in higher stringency wash buffer (0.1×SSC plus 0.2% SDS) (Schena et al., Proc. Natl. Acad. Sci. U.S.A. 93:10614 (1993)). Useful hybridization conditions are also provided in, e.g., Tijessen, 1993, HYBRIDIZATION WITH NUCLEIC ACID PROBES, Elsevier Science Publishers B. V.; and Kricka, 1992, NONISOTOPIC DNA PROBE TECHNIQUES, Academic Press, San Diego, Calif.

[0252] Particularly preferred hybridization conditions include hybridization at a temperature at or near the mean melting temperature of the probes (e.g., within 5° C., more preferably within 2° C.) in 1 M NaCl, 50 mM MES buffer (pH 6.5), 0.5% sodium sarcosine and 30% formamide.

### 3.5.2.6 Signal Detection and Data Analysis

[0253] When fluorescently labeled probes are used, the fluorescence emissions at each site of a microarray may be, preferably, detected by scanning confocal laser microscopy. In one embodiment, a separate scan, using the appropriate excitation line, is carried out for each of the two fluorophores used. Alternatively, a laser may be used that allows simultaneous specimen illumination at wavelengths specific to the two fluorophores and emissions from the two fluorophores can be analyzed simultaneously (see Shalon et al., 1996, “A DNA microarray system for analyzing complex DNA samples using two-color fluorescent probe hybridization,” Genome Research 6:639-645, which is incorporated by reference in its entirety for all purposes). In a preferred embodiment, the arrays are scanned with a laser fluorescent scanner with a computer controlled X-Y stage and a microscope objective. Sequential excitation of the two fluorophores is achieved with a multi-line, mixed gas laser and the emitted light is split by wavelength and detected with two photomultiplier tubes. Fluorescence laser scanning devices are described in Schena et al., Genome Res. 6:639-645 (1996), and in other references cited herein. Alternatively, the fiber-optic bundle described by Ferguson et al., Nature Biotech. 14:1681-1684 (1996), may be used to monitor mRNA abundance levels at a large number of sites simultaneously.

[0254] Signals are recorded and, in a preferred embodiment, analyzed by computer, e.g., using a 12 or 16 bit analog to digital board. In one embodiment the scanned image is despeckled using a graphics program (e.g., Hijaak Graphics Suite) and then analyzed using an image gridding program that creates a spreadsheet of the average hybridization at each wavelength at each site. If necessary, an experimentally determined correction for “cross talk” (or overlap) between the channels for the two fluors may be made. For any particular hybridization site on the transcript array, a ratio of the emission of the two fluorophores can be calculated. The ratio is independent of the absolute expression level of the cognate gene, but is useful for genes whose expression is significantly modulated in association with the different breast cancer-related condition.

### 3.6 COMPUTER-FACILITATED ANALYSIS

[0255] The present invention further provides for kits comprising the biomarker sets above. In a preferred embodiment, the kit contains a microarray ready for hybridization to target polynucleotide molecules, plus software for the data analyses described above.

[0256] The analytic methods described in the previous sections can be implemented by use of the following computer systems and according to the following programs and methods. A Computer system comprises internal components linked to external components. The internal components of a typical computer system include a processor element interconnected with a main memory. For example, the computer system can be an Intel 8086-, 80386-, 80486-, Pentium®, or Pentium®-based processor with preferably 32 MB or more of main memory.

[0257] The external components may include mass storage. This mass storage can be one or more hard disks (which are typically packaged together with the processor and memory). Such hard disks are preferably of 1 GB or greater storage capacity. Other external components include a user interface device, which can be a monitor, together with an inputting device, which can be a “mouse”, or other graphic input devices, and/or a keyboard. A printing device can also be attached to the computer.

[0258] Typically, a computer system is also linked to network link, which can be part of an Ethernet link to other local computer systems, remote computer systems, or wide area communication networks, such as the Internet. This network link allows the computer system to share data and processing tasks with other computer systems.

[0259] Loaded into memory during operation of this system are several software components, which are both standard in the art and special to the instant invention. These software components collectively cause the computer system to function according to the methods of this invention. These software components are typically stored on the mass storage device. A software component comprises the operating system, which is responsible for managing computer system and its network interconnections. This operating system can be, for example, of the Microsoft Windows® family, such as Windows 3.1, Windows 95, Windows 98, Windows 2000, or Windows NT. The software component represents common languages and functions conveniently present on this system to assist programs implementing the methods specific to this invention. Many high or low level computer languages can be used to program the analytic methods of this invention. Instructions can be interpreted during run-time or compiled. Preferred languages include C/C++, FORTRAN and JAVA. Most preferably, the methods of this invention are programmed in mathematical software packages that allow symbolic entry of equations and high-level specification of processing, including some or all of the algorithms to be used, thereby freeing a user of the need to procedurally program individual equations or algorithms. Such packages include Mathlab from Mathworks (Natick, Mass.), Mathematica® from Wolfram Research (Champaign, Ill.), or S-Plus®D from Math Soft (Cambridge, Mass.). Specifically, the software component includes the analytic methods of the invention as programmed in a procedural language or symbolic package.

[0260] The software to be included with the kit comprises the data analysis methods of the invention as disclosed herein. In particular, the software may include mathematical routines for biomarker discovery, including the calculation of correlation coefficients between clinical categories (i.e., RAS signaling pathway regulation status) and biomarker expression. The software may also include mathematical routines for calculating the correlation between sample biomarker expression and control biomarker expression, using array-generated fluorescence data, to determine the clinical classification of a sample.

[0261] In an exemplary implementation, to practice the methods of the present invention, a user first loads experimental data into the computer system. These data can be directly entered by the user from a monitor, keyboard, or from other computer systems linked by a network connection, or on removable storage media such as a CD-ROM, floppy disk (not illustrated), tape drive (not illustrated), ZIP® drive (not illustrated) or through the network. Next the user causes execution of expression profile analysis software which performs the methods of the present invention.

[0262] In another exemplary implementation, a user first loads experimental data and/or databases into the computer system. This data is loaded into the memory from the storage media or from a remote computer, preferably from a dynamic geneset database system, through the network. Next the user causes execution of software that performs the steps of the present invention.

[0263] Alternative computer systems and software for implementing the analytic methods of this invention will be apparent to one of skill in the art and are intended to be comprehended within the accompanying claims. In particular, the accompanying claims are intended to include the alternative program structures for implementing the methods of this invention that will be readily apparent to one of skill in the art.

### EXAMPLES

### Example 1

### Identification of Gene-Expression Based RAS Pathway Activity Biomarkers

[0264] Genome wide gene expression profiling provides a new paradigm for detecting and understanding oncogene deregulation by measuring coherent changes in multiple genes downstream from oncogene signaling. A recent study by Bild et al. (2006, Nature 439:353-357) set the stage for developing oncogene signatures for activation of the RAS, Myc, E2F3, Src, and beta-catenin pathways. These signatures were derived from primary human mammary epithelial cells stably transfected with each of these five oncogenes. The linear combination of genes in the signatures was shown to be predictive of sensitivity to therapeutic agents targeting specific pathways. Although this study provided an important proof of concept for developing oncogene signatures, it left open for interpretation the exact methods for using the genes in the signatures for measuring oncogene deregulation in tumor samples. Specifically, the expectation from this study was that the genes from the RAS signature that were perturbed in opposite directions by RAS overexpression would be anti-correlated when assessed in large sets of tumor samples that have variable RAS activity. However, these genes showed a positive correlation in such tumor samples. Thus, a linear combination of genes with the same signs as observed in the training set would fail to detect upregulation of RAS signaling in test sets from human tumors.

[0265] An alternative method for developing a RAS signature was proposed by Sweet-Cordero et al. (2005, Nat. Genet. 37:48-55). This group used cross-species gene expression analysis to derive a signature of oncogenic KRAS2. They obtained gene expression profiles from the tumors of mice genetically engineered to express activated KRAS2 in lung tissues and compared these profiles to human lung cancers. A common gene expression signature was found between mice and humans. A third approach to derive a RAS signature was used by Blum et al. (2007, Cancer Res. 67:3320-3328), who derived a RAS signature by blocking RAS activity with Salirasib (S-Farnesylthiosalicylic Acid). A RAS signature was derived from gene expression changes in 5 human tumor cell lines at 24-72 hr post treatment. While these three signatures report on a similar biological state (RAS activity), the signatures contain different genes, and did not show a coherent pattern of expression in cell line panels or tumors based on our internal gene expression profiling data.

[0266] We wished to identify a gene expression signature of RAS pathway activity that was coherent across various cell lines and tumor datasets and could be used in pre-clinical models. We started with four RAS pathway signatures identified in three publications: 1) Bild et al., 2006, Nature 439:353-357 (referred to hereinafter as “Nevins”); 2) Blum et al., 2007, Cancer Res. 67:3320-3328 (referred to hereinafter as “Blum”; and 3) Sweet-Carder et al., 2005, Nat. Genet. 37:48-55 (original signature referred to hereinafter as “Jacks” and refined signature referred to hereinafter as “Jacks123”). All of these RAS signatures were split into two opposing “arms” —the “up” arm, comprising the set of genes that are upregulated as signaling through the RAS pathway increases, and the “down” arm, comprising the set of genes that are down-regulated as signaling through the RAS pathway increases.

[0267] We derived our own RAS signature using supervised analysis of the Nevins, Blum, Jacks, and Jacks123 signatures and their consensus prediction of RAS mutation status generated in lung cell lines. Specifically, we used the consensus prediction of KRAS mutation status generated in lung cell lines (RAS mutation status identified from the Wellcome Trust Sanger Institute (http://www.sanger.ac.uk/genetics/CGP/CellLines/). We derived a coherent “up” core set of 105 genes from the above published signatures (See Table 2a). Using this core set of “up” genes as a seed set, we then identified genes that were anti-correleated with the “up” genes and were upregulated in RAS wild-type cell lines compared to mutant. These 42 anti-correlated genes represent the “down” arm of our RAS signature (See Table 2b).

TABLE 2a
“Up” arm of the RAS pathway signature gene set

| Gene Symbol | Transcript ID | SEQ ID NO: | Probe SEQ ID NO: |
|---|---|---|---|
| ADAM8 | NM_001109 | 1 | 106 |
| ADRB2 | NM_000024 | 2 | 107 |
| ANGPTL4 | NM_139314 | 3 | 108 |
| ARNTL2 | NM_020183 | 4 | 109 |
| C19orf10 | NM_019107 | 5 | 110 |
| C20orf42 | NM_017671 | 6 | 111 |
| CALM2 | NM_001743 | 7 | 112 |
| CALU | NM_001219 | 8 | 113 |
| CAPZA1 | NM_006135 | 9 | 114 |
| CCL20 | NM_004591 | 10 | 115 |
| CD274 | NM_014143 | 11 | 116 |
| CDCP1 | NM_022842 | 12 | 117 |
| CLCF1 | NM_013246 | 13 | 118 |
| CSNK1D | NM_139062 | 14 | 119 |
| CXCL1 | NM_001511 | 15 | 120 |
| CXCL2 | NM_002089 | 16 | 121 |
| CXCL3 | NM_002090 | 17 | 122 |
| CXCL5 | NM_002994 | 18 | 123 |
| DENND2C | NM_198459 | 19 | 124 |
| DUSP1 | NM_004417 | 20 | 125 |
| DUSP4 | NM_001394 | 21 | 126 |
| DUSP5 | NM_004419 | 22 | 127 |
| DUSP6 | NM_022652 | 23 | 128 |
| EFNB1 | NM_004429 | 24 | 129 |
| EGR1 | NM_001964 | 25 | 130 |
| EHD1 | NM_006795 | 26 | 131 |
| ELK3 | NM_005230 | 27 | 132 |
| EREG | NM_001432 | 28 | 133 |
| FOS | NM_005252 | 29 | 134 |
| FOXQ1 | NM_033260 | 30 | 135 |
| G0S2 | NM_015714 | 31 | 136 |
| GDF15 | NM_004864 | 32 | 137 |
| GLTP | NM_016433 | 33 | 138 |
| HBEGF | NM_001945 | 34 | 139 |
| IER3 | NM_003897 | 35 | 140 |
| IL13RA2 | NM_000640 | 36 | 141 |
| IL1A | NM_000575 | 37 | 142 |
| IL1B | NM_000576 | 38 | 143 |
| IL8 | NM_000584 | 39 | 144 |
| ITGA2 | NM_002203 | 40 | 145 |
| ITPR3 | NM_002224 | 41 | 146 |
| KCNK1 | NM_002245 | 42 | 147 |
| KCNN4 | NM_002250 | 43 | 148 |
| KLF5 | NM_001730 | 44 | 149 |
| KLF6 | NM_001300 | 45 | 150 |
| LAMA3 | NM_198129 | 46 | 151 |
| LDLR | NM_000527 | 47 | 152 |
| LHFPL2 | NM_005779 | 48 | 153 |
| LIF | NM_002309 | 49 | 154 |
| MALL | NM_005434 | 50 | 155 |
| MAP1LC3B | hCT1640758.2 | 51 | 156 |
| MAST4 | BX101442 | 52 | 157 |
| MMP14 | NM_004995 | 53 | 158 |
| MXD1 | NM_002357 | 54 | 159 |
| NAV3 | NM_014903 | 55 | 160 |
| NDRG1 | NM_006096 | 56 | 161 |
| NFKBIZ | NM_031419 | 57 | 162 |
| NPAL1 | NM_207330 | 58 | 163 |
| NT5E | NM_002526 | 59 | 164 |
| OXSR1 | NM_005109 | 60 | 165 |
| PBEF1 | NM_005746 | 61 | 166 |
| PHLDA1 | AK074510 | 62 | 167 |
| PHLDA2 | NM_003311 | 63 | 168 |
| PI3 | NM_002638 | 64 | 169 |
| PIK3CD | NM_005026 | 65 | 170 |
| PIM1 | NM_002648 | 66 | 171 |
| PLAUR | NM_001005376 | 67 | 172 |
| PNMA2 | ENST00000305426 | 68 | 173 |
| PPP1R15A | NM_014330 | 69 | 174 |
| PRNP | NM_183079 | 70 | 175 |
| PTGS2 | NM_000963 | 71 | 176 |
| PTHLH | NM_198965 | 72 | 177 |
| PTPRE | NM_006504 | 73 | 178 |
| PTX3 | NM_002852 | 74 | 179 |
| PVR | NM_006505 | 75 | 180 |
| RPRC1 | NM_018067 | 76 | 181 |
| S100A6 | NM_014624 | 77 | 182 |
| SDC1 | NM_002997 | 78 | 183 |
| SDC4 | NM_002999 | 79 | 184 |
| SEMA4B | HSS00219047 | 80 | 185 |
| SERPINB1 | NM_030666 | 81 | 186 |
| SERPINB2 | NM_002575 | 82 | 187 |
| SERPINB5 | NM_002639 | 83 | 188 |
| SESN2 | NM_031459 | 84 | 189 |
| SFN | NM_006142 | 85 | 190 |
| SLC16A3 | NM_004207 | 86 | 191 |
| SLC2A14 | NM_153449 | 87 | 192 |
| SLC2A3 | NM_006931 | 88 | 193 |
| SLC9A1 | NM_003047 | 89 | 194 |
| SPRY4 | NM_030964 | 90 | 195 |
| TFPI2 | NM_006528 | 91 | 196 |
| TGFA | NM_003236 | 92 | 197 |
| TIMP1 | NM_003254 | 93 | 198 |
| TMEM45B | NM_138788 | 94 | 199 |
| TNFRSF10A | NM_003844 | 95 | 200 |
| TNFRSF10B | NM_003842 | 96 | 201 |
| TNFRSF12A | NM_016639 | 97 | 202 |
| TNS4 | NM_032865 | 98 | 203 |
| TOR1AIP1 | NM_015602 | 99 | 204 |
| TSC22D1 | NM_006022 | 100 | 205 |
| TUBA1 | NM_006000 | 101 | 206 |
| UAP1 | NM_003115 | 102 | 207 |
| UPP1 | NM_181597 | 103 | 208 |
| VEGF | NM_003376 | 104 | 209 |
| ZFP36 | NM_003407 | 105 | 210 |

TABLE 2b
“Down” arm of the RAS pathway signature gene set

| Gene Symbol | Transcript ID | SEQ ID NO: | Probe SEQ ID NO: |
|---|---|---|---|
| ABCC5 | NM_005688 | 211 | 253 |
| ARMC8 | NM_015396 | 212 | 254 |
| ATPAF1 | NM_022745 | 213 | 255 |
| AUTS2 | NM_015570 | 214 | 256 |
| C1orf96 | NM_145257 | 215 | 257 |
| C6orf182 | NM_173830 | 216 | 258 |
| CELSR2 | NM_001408 | 217 | 259 |
| CENTB2 | NM_012287 | 218 | 260 |
| COQ7 | NM_016138 | 219 | 261 |
| DRD4 | NM_000797 | 220 | 262 |
| ENAH | NM_018212 | 221 | 263 |
| HNRPU | Contig24903_RC | 222 | 264 |
| HTATSF1 | NM_014500 | 223 | 265 |
| ID4 | NM_001546 | 224 | 266 |
| ITSN1 | AF003738 | 225 | 267 |
| JMJD2C | Contig25062_RC | 226 | 268 |
| KIAA1772 | NM_024935 | 227 | 269 |
| MIB1 | NM_020774 | 228 | 270 |
| MRPS14 | NM_022100 | 229 | 271 |
| MSI1 | NM_002442 | 230 | 272 |
| MSI2 | Contig57081_RC | 231 | 273 |
| NUP133 | NM_018230 | 232 | 274 |
| OGN | NM_024416 | 233 | 275 |
| PARP1 | NM_001618 | 234 | 276 |
| PIAS1 | NM_016166 | 235 | 277 |
| RASL10B | NM_033315 | 236 | 278 |
| RFPL3S | AJ010233 | 237 | 279 |
| RTN3 | NM_006054 | 238 | 280 |
| SEC63 | NM_007214 | 239 | 281 |
| SF4 | NM_182812 | 240 | 282 |
| SH3GL2 | NM_003026 | 241 | 283 |
| SMAD9 | NM_005905 | 242 | 284 |
| STARD7 | NM_020151 | 243 | 285 |
| TBC1D24 | NM_020705 | 244 | 286 |
| TMEFF1 | NM_003692 | 245 | 287 |
| TTC28 | NM_015281 | 246 | 288 |
| TXNDC4 | NM_015051 | 247 | 289 |
| ZNF292 | ENST00000339907 | 248 | 290 |
| ZNF441 | NM_152355 | 249 | 291 |
| ZNF493 | NM_175910 | 250 | 292 |
| ZNF669 | NM_024804 | 251 | 293 |
| ZNF672 | NM_024836 | 252 | 294 |

### Example 2

### Coherency of RAS Pathway Signature in Cell Line Panels

[0268] As a first step in the analysis of the RAS signatures, we assessed the coherency of the signatures across four cell line panels from lung, colon, breast, and lymphoid malignancies. The purpose of coherence analysis is to show the statistical significance of the difference between the “Up” and “Down” arms of the signature in a new dataset. Two correlation coefficients were calculated for all of the genes in both the Up and Down arms. First, the correlation between each gene in the Up arm and the average of all genes in the Up arm is calculated. Second, the anticorrelation between each gene in the Up arm and the average of all genes in the Down arm is calculated. This is repeated for genes in the Down arm. If the signature is coherent, most of the genes from the Up arm should correlate with the average of all Up genes and anticorrelate with the average of all genes in the Down arm. A Fisher exact test is calculated for correlation within and between arms of the signature to assess the significance of signature coherence in a new dataset. Signatures are refined by filtering out the genes that do not show the correct correlation-anticorrelation behavior. This filtering process enables the identification of the subset of signature genes that retains information regarding signaling activity and elimination of genes that are not robustly co-regulated in a new dataset. RAS pathway activity (or regulation) is summarized into a RAS signature score, which is calculated as: (mean expression of Up genes (Table 2a))—(mean expression of Down genes (Table 2b)). A sample with a RAS pathway signature score >0 is classified as having a deregulated RAS pathway, while a RAS pathway signature score <0 is classified as having a regulated RAS pathway.

[0269] Initial signature coherence analysis and pairwise comparison of cell lines was performed on cell lines (CMTI portion of the Cell Line Atlas (breast, colon, lung, lymphoma)). Prediction of RAS mutation status was also performed on cell lines from the cell lines atlas for which RAS mutation data was available. Further check of the coherence of signatures was performed on the Netherlands Cancer Institute (NKI) colon and breast datasets, fresh tumors (Tumor Atlas for breast, colon, lung), and formalin-fixed paraffin embedded (FFPE) samples (the Mayo FFPE datasets for lung, ovarian and breast).

[0270] Total RNA was isolated from cell lines and converted to fluorescently labeled cRNA that was hybridized to DNA oligonucleotide microarrays as described previously (Hughes et al., 2001, Nat. Biotechnol. 19:342-347; Marton et al., 1998, Nat. Med. 4:1293-1301). Briefly, 4 μg of total RNA from each sample was used to synthesize dsDNA through reverse transcription. cRNA was produced by in vitro transcription and labeled post-synthetically with Cy3 or Cy5. Probe sequences were chosen to maximize gene specificity and minimize the 3′-replication bias inherent in reverse transcription of mRNA. In addition, all microarrays contained approximately 2,000 control probes for quality control purposes. All probes on the microarrays were synthesized in situ with inkjet technology (Agilent Technologies, Palo Alto, Calif.; Hughes et al, 2001, Nat. Biotechnol. 19:342-347). After hybridization, arrays were scanned and fluorescence intensities for each probe were recorded. Ratios of transcript abundance (experimental to control) were obtained following normalization and correction of the array intensity data. Gene expression data was analyzed using Rosetta Resolver gene expression analysis software (version 7.0, Rosetta Biosoftware, Seattle, Wash.) and MATLAB (The MathWorks, Natick, Mass.).

[0271] Table 1 summarizes the results of this coherency test for all of the signatures in the four cell line panels. The analysis shows that Nevins (activated RAS expression in HMEC) and Jacks (activated RAS expression in mouse lung) signatures, the two signatures that are based on constitutive deregulation of RAS signaling, are not coherent with p-value >0.05 based on a Fisher exact test, while our RAS signature and the Blum signature (cell line treatment with RAS inhibitor) are coherent across all the datasets.

[0272] FIG. 2A shows that the “up” and “down” arms of the 147 gene RAS pathway signature is highly coherent in the breast cell line panel, with a p-value of less than 10⁻⁹ by a Fisher exact test. A heatmap based on all the genes (FIG. 2B) and a heatmap after filtering the genes (FIG. 2D) show that the “UP” and “DOWN” arms of our signature cluster apart in this dataset. Finally, FIG. 2C shows a scatter plot of the “UP” and “DOWN” arms for the signature before filtering. The p-value of the anticorrelation is significant based on the Kendall, Spearman, or Pearson correlation tests. As an example of a signature that is not coherent, FIGS. 3A, B, and C show a similar analysis done for the Nevins signature in breast cell lines. FIG. 3A demonstrates that this signature is not coherent by our coherence test with p-value >0.05. The same can be seen in FIG. 3B, in which genes from “UP” and “DOWN” arms cluster together in the heatmap. As shown in FIG. 3C, The “UP” and “DOWN” arms of this signature correlate rather than anticorrelate. This lack of coherence for the Nevins signature presents a problem for scoring their RAS signature unless we leverage an independent line of evidence to confirm the scores.

TABLE 3
Coherency test for RAS signatures across four cell line panels

| | Our RAS | Nevins | Jacks | Blum |
|---|---|---|---|---|
| Lymphoma | <e−12 | >0.05 | >0.05 | <e−9 |
| Lung | <e−12 | >0.05 | >0.05 | <e−9 |
| Breast | <e−12 | >0.05 | >0.05 | <e−9 |
| Colon | <e−12 | >0.05 | >0.05 | <e−9 |

### Example 3

### Consensus of Different Signatures in Cell Lines

[0273] In this analysis we wished to assess if the different RAS pathway signatures significantly correlate and thus make similar predictions about RAS pathway deregulation in the four cell line panels. FIGS. 4A-D show the pair-wise scatter plots for our RAS signature, the Nevins UP signature, the Blum signature, and the Jack original and refined signatures. In breast cell lines (FIG. 4A), we see significant pairwise correlations between our signature and Nevins, Blum and Jack's refined signatures but not with the original Jacks signature. The negative sign of correlation between our RAS and Blum's RAS signatures is due to sign selection for Blum's results. We assigned the genes that are upregulated by RAS inhibitors into the “Down” arm and those that are downregulated by RAS inhibitors into the “Up” arm. One possible explanation for this observation is that the acute inhibition of RAS leads to changes in expression that are mimicking upregulated RAS signaling rather than reversing it. Nevertheless, the significance of pairwise correlations is very high with p-values based on Kendal, Pearson, or Spearman correlations lower than 10⁻⁹ for all but Jack's original signature. Our RAS pathway signature also showed a wide dynamic range relative to the other signatures, with scores ranging from −0.5 to 0.5.

[0274] Similar to the breast cell line panel, the colon (FIG. 4B), lung (FIG. 4C) and lymphoma (FIG. 4D) panels showed significant pairwise correlation between our RAS signature and other RAS signatures. As was the case with the breast panel, we saw a negative sign of correlation between our RAS and the Blum RAS signature. The Jacks original RAS signature shows significant correlation with our RAS signature in lung and lymphoma panels, but not in the colon panel. Interestingly, the dynamic range of our RAS signature in colon panel was rather narrow for all but two cell lines, which have very negative scores (discussed below). The dynamic range in lymphoma and lung was similar to what was observed in breast.

### Example 4

### Prediction of RAS Mutations in Cell Lines and Tumors by RAS Pathway Signature

[0275] We then assessed the ability of our RAS pathway signature to predict RAS mutations in cell lines (FIGS. 5A, B, C). Cell lines were grown in 10% fetal calf serum in tissue culture plates. RNA was extracted using RNEasy kits according to manufacturer instructions. Cell lines were profiled at baseline on Agilent gene expression microarrays. KRas mutation status was obtained from publicly available data sources (Sanger Center database). RAS pathway signature score was calculated and samples were classified as previously described.

[0276] All but one lung cell line with RAS mutations had positive signature scores (FIG. 5B), while 63% of RAS wt cell lines had negative scores. Thus, our signature has a high sensitivity but low specificity of prediction of RAS mutation status. Low specificity can be attributed to mutations in other members of the RAS pathway in RAS wt cell lines (for example, BRAF), which would contribute to high RAS signature scores in RAS wildtype cell lines. Qualitatively, we can see that BRAF contributes to RAS score in colon and breast cell lines.

[0277] In colon cell lines the situation is more complicated. Our RAS signature has a low dynamic range for all but one cell line (for the other cell line with low signature score shown in FIG. 5A, mutation status is not known). Distributions of signature scores are similar for RAS mutant and RAS wt colon cell line groups, with slightly higher scores for RAS mutant cell lines compared to RAS wt. This observation can be attributed to BRAF mutant status of RAS wt cell lines. Indeed, RAS wt cell lines with BRAF mutations have higher scores than those without BRAF mutations. Four out of five BRAF wt RAS wt cell lines have negative scores, including the cell line with the lowest signature score.

[0278] For breast cell lines (FIG. 5C), there are only two cell lines with RAS mutations and both of them show highly positive RAS scores. Among RAS wt breast cell lines 30% have high RAS signature scores. Again, it is possible that this can be attributed to other mutations in the pathway among RAS wt, BRAF wt cell lines.

[0279] FIG. 6 shows that the RAS pathway signature is able to accurately predict RAS mutations in NSCLC tumor samples (11/12 correct predictions). Tumors were extracted from patients, flash frozen, macrodissected, and then RNA was extracted using RNEasy kits according to manufacturer instructions. Tumors were profiled at baseline on Affymetrix gene expression microarrays. KRas mutation status was obtained by targeted genotyping of the KRas gene. RAS pathway signature score was calculated as previously described.

### Example 5

### RAS Pathway Signature Geneset is Coherent in Human Tumors and can be Used to Rank Tumors Based on Score

[0280] The coherence of our RAS signature was assessed in fresh frozen tumor samples from lung, breast, colon, and gastric tumors and in FFPE samples from lung, breast and ovarian tumors. RAS pathway signatures score was calculated and samples were classified as previously described. In fresh tumors the signature was significantly coherent across all tumor types (data not shown). The significance of coherence in breast tumors was highest when scored in triple negative tumors only. In FFPE samples, our RAS pathway signature coherence was high in all available tumor types: lung (FIG. 7A), ovarian (FIG. 7C) and breast (FIG. 7E). Each of these datasets showed coherency of the “Up” and “Down” arms of our RAS signature with p-value less than 10⁻¹⁰. We also observed significant correlation between our RAS signature and published RAS signatures in FFPE samples in lung (FIG. 7B), ovarian (FIG. 7D), and breast (FIG. 7F).

### Example 6

### RAS Pathway Signature Predicts the Prevalence of RAS Deregulation in Tumor Subtypes

[0281] We then assessed the expression of our RAS pathway signature in tumor datasets with available histology information to predict the prevalence of RAS pathway activation in tumor subtypes. In ovarian tumors, we observed a high prevalence of RAS pathway deregulation in the Carcinoma, Clear Cell Adenocarcinoma, and Andometroid Cystadenoma subtypes, while we observed a low prevalence of RAS pathway activation in Papilary Serous Adenocarcinoma, Benign Serous Adenoma, and Adenoma (FIG. 8).

[0282] In non-small cell lung tumors, our RAS pathway signature was differentially expressed between squamous cell carcinoma and adenocarcinoma subtypes (FIG. 9). Expression data suggest very low incidence of RAS pathway deregulation in squamous cell carcinoma and approximately 70-75% rate of RAS pathway deregulation in adenocarcinoma. Our cell line data suggest that RAS pathway deregulation is very low in small cell lung cancer as well.

[0283] In breast tumors, RAS signature levels were variable across tumor subtypes. In triple negative tumors (HER2-, ER-, PR-), RAS deregulation was observed in about half of the cases. Combined with the growth factor signature, which is high in most of the triple negative tumors, RAS pathway signature low/Growth Factor Signaling Pathway high tumors comprise 48% triple negative tumors (FIG. 10B). See PCT application, “Methods and Gene Expression Signature for Assessing Growth Factor Signaling Pathway Regulation Status” by James Watters et al., filed on Mar. 19, 2009, for description and methods of using Growth Factor Signaling Pathway biomarkers.

[0284] The RAS pathway signature score was also calculated in a dataset of fresh frozen tumor specimens from various tissues of origin. The distribution of the scores was plotted across tumor types (FIG. 11), showing that the RAS pathway signature score can be used to rank tumors according to RAS pathway deregulation.

### Example 7

### K-RAS siRNA Knockdown Suggests that RAS Pathway Signature is More Predictive of RAS Dependence than K-RAS Mutational Status

[0285] K-RAS mutant lung cancer cell lines with high or low RAS pathway signature scores were treated with siRNAs targeting K-RAS gene, and the effects on cell viability was assessed using the ATP vialight assay (Lonza Rockland, Inc., Rockland, Me.) (FIG. 12).

### Example 8

### Upregulation of RAS Pathway Signature is Associated with Acquired Resistance to AKT Inhibitor in Breast Cancer Cell Lines

[0286] High baseline levels of our RAS pathway signature predict resistance to a small molecule inhibitor of AKT (MK-6673; WO2006/135627), a central mediator of PI3K pathway signaling, in a panel of breast cancer cell lines, none of which harbor a KRas mutation (FIG. 13). Cells were profiled at baseline on Agilent gene expression microarrays. Sensitivity to and AKTi was determined by incubating cells with MK-6673 for 72 hours and assessing viability using the ATPlite assay (Perkin Elmer, Waltham, Mass.). RAS pathway signature score was calculated as previously described. Defining resistant cell lines as those with % inhibition <60% and sensitive as those with % inhibition>60%, our RAS signature achieved 78% classification accuracy (p-value by Fisher Exact test<0.002).

[0287] To further investigate mechanisms by which tumor cells may acquire resistance to AKT inhibition, we generated resistant versions of two normally drug sensitive breast cancer cell lines by long-term culture in the presence of increasing doses of another AKT compound (MK-2206; WO2008/070016). Gene expression profiling of surviving cells demonstrated that resistance was achieved by up-regulation of the RAS pathway signature in both cell lines (FIG. 14).

### Example 9

### RAS Pathway Signature Predicts Response to MEK Inhibitor

[0288] The RAS pathway signature predicts sensitivity to inhibition of MEK, a key component of RAS pathway signaling. In a panel of approximately 100 lung cancer cell lines, high baseline RAS pathway signature scores predicts sensitivity to MEK inhibition (MEKi385, also known as PD 0325901 (N-(2,3-dihydroxy-propoxy)-3,4-difluoro-2-(2-fluoro-4-iodo-phenylamino)-benzamide), Barrett et al., 2008, Bioorg. Med. Chem. Lett. 18:6501-4) (FIG. 15). Cells were profiled at baseline on Affymetrix gene expression microarrays as previously described. RAS pathway signature scores were calculate dna samples were classified as previously described. Sensitivity to MEKi was determined by incubating cells with drug for 72 hours and assessing viability using the ATPlite assay (Perkin Elmer, Waltham, Mass.). Importantly, this relationship between the RAS pathway signature and MEK inhibition was observed in both KRas mutant (FIG. 16) and KRas wildtype cell lines (FIG. 17).

### Example 10

### RAS Pathway Signature can be Used to Measure Pharmacodynamic Effect of an Agent In Vivo on the RAS Pathway

[0289] The RAS pathway signature has been shown to predict RAS pathway deregulation in cell lines and tumor samples and predict response of cell lines to RAS pathway inhibitors. Next, we wished to investigate whether RAS pathway signature scores would decrease in vivo following treatment with a RAS pathway inhibitor in a RAS driven animal model.

[0290] Mice carrying p53 loss of function and KRas mutant lung tumors were selected as the cancer model (7450 KP-model, whose genetics is KRas^{LSL-G12D}; P53^{LSL-R270HFL}). In this mouse model, oncogenic KRas initiates and drives tumor development; mutant p53 increases tumor aggressiveness. KP mice develop lung adenocarcinomas with an average survival time of ˜12 weeks after being given 2−5×10⁷ pfu AdenoCre intranasally. The 7450 KP-model closely mimics human lung cancer progression.

[0291] The 7450 KP mice were treated with a small molecule MEK inhibitor, AZD6244 (Ohren et al., 2004, Nat. Struct. Mol. Biol. 11:119201197). AZD6244 is a potent and selective noncompetitive inhibitor of MEK1 and MEK2, with an in vitro IC₅₀ of 10 to 14 nmol/L against purified enzyme. AZD6244 significantly halted tumor progression compared vehicle after 4 weeks of treatment (data not shown). AZD6244 is cleared quickly post-dost in CD-1 nude mice; blood concentration of AZD6244 peaked before 2 hours and then decreased rapidly (data not shown). 7450 KP-model mice were treated with AZD6244 (150 mpk; n=12 per time point) or vehicle with three doses timed 10 hours apart. Tumors were extracted at 0, 4, and 24 hours post last dose and subjected to gene expression profiling as previously described. RAS signature pathway signatures scores were calculated as previously described for each time point and plotted (FIG. 18). As shown in FIGS. 18 and 19, RAS pathway signature is down-regulated by MEK inhibitor AZD6244 in vivo at 4 hours but not at 24 hours, consistent with the compounds short half-life in vivo. This data suggests that the RAS pathway signature could be used as an early readout of compound efficacy.

The application's sequence listing, which the Patent Office published only in electronic form, follows.

SEQUENCE LISTING (294 sequences)

SEQ ID NO: 1 - DNA, 3280 bp, Homo sapiens
agaccgtgtcccgcggggctgtcacctccgcctctgctccccgacccggccatgcgcggcctcgggctctggctgctgggcgcgatgatgctgcctgcgattgcccccagccggccctgggccctcatggagcagtatgaggtcgtgttgccgtggcgtctgccaggcccccgagtccgccgagctctgccctcccacttgggcctgcacccagagagggtgagctacgtccttggggccacagggcacaacttcaccctccacctgcggaagaacagggacctgctgggctccggctacacagagacctatacggctgccaatggctccgaggtgacggagcagcctcgcgggcaggaccactgcttctaccagggccacgtagaggggtacccggactcagccgccagcctcagcacctgtgccggcctcaggggtttcttccaggtggggtcagacctgcacctgatcgagcccctggatgaaggtggcgagggcggacggcacgccgtgtaccaggctgagcacctgctgcagacggccgggacctgcggggtcagcgacgacagcctgggcagcctcctgggaccccggacggcagccgtcttcaggcctcggcccggggactctctgccatcccgagagacccgctacgtggagctgtatgtggtcgtggacaatgcagagttccagatgctggggagcgaagcagccgtgcgtcatcgggtgctggaggtggtgaatcacgtggacaagctatatcagaaactcaacttccgtgtggtcctggtgggcctggagatttggaatagtcaggacaggttccacgtcagccccgaccccagtgtcacactggagaacctcctgacctggcaggcacggcaacggacacggcggcacctgcatgacaacgtacagctcatcacgggtgtcgacttcaccgggactaccgtggggtttgccagggtgtccgccatgtgctcccacagctcaggggctgtgaaccaggaccacagcaagaaccccgtgggcgtggcctgtaccatggcccatgagatgggccacaacctgggcatggaccatgatgagaacgtccagggctgccgctgccaggaacgcttcgaggccggccgctgcatcatggcgggcagcattggctccagtttccccaggatgttcagtgactgcagccaggcctacctggagagctttttggagcggccgcagtcggtgtgcctcgccaacgcccctgacctcagccacctggtgggcggccccgtgtgtgggaacctgtttgtggagcgtggggagcagtgcgactgcggcccccccgaggactgccggaaccgctgctgcaactctaccacctgccagctggctgagggggcccagtgtgcgcacggtacctgctgccaggagtgcaaggtgaagccggctggtgagctgtgccgtcccaagaaggacatgtgtgacctcgaggagttctgtgacggccggcaccctgagtgcccggaagacgccttccaggagaacggcacgccctgctccgggggctactgctacaacggggcctgtcccacactggcccagcagtgccaggccttctgggggccaggtgggcaggctgccgaggagtcctgcttctcctatgacatcctaccaggctgcaaggccagccggtacagggctgacatgtgtggcgttctgcagtgcaagggtgggcagcagcccctggggcgtgccatctgcatcgtggatgtgtgccacgcgctcaccacagaggatggcactgcgtatgaaccagtgcccgagggcacccggtgtggaccagagaaggtttgctggaaaggacgttgccaggacttacacgtttacagatccagcaactgctctgcccagtgccacaaccatggggtgtgcaaccacaagcaggagtgccactgccacgcgggctgggccccgccccactgcgcgaagctgctgactgaggtgcacgcagcgtccgggagcctccccgtcttcgtggtggtggttctggtgctcctggcagttgtgctggtcaccctggcaggcatcatcgtctaccgcaaagcccggagccgcatcctgagcaggaacgtggctcccaagaccacaatggggcgctccaaccccctgttccaccaggctgccagccgcgtgccggccaagggcggggctccagccccatccaggggcccccaagagctggtccccaccacccacccgggccagcccgcccgacacccggcctcctcggtggctctgaagaggccgccccctgctcctccggtcactgtgtccagcccacccttcccagttcctgtctacacccggcaggcaccaaagcaggtcatcaagccaacgttcgcacccccagtgcccccagtcaaacccggggctggtgcggccaaccctggtccagctgagggtgctgttggcccaaaggttgccctgaagccccccatccagaggaagcaaggagccgagctcccacagcaccctaggggggcacctgcgcctgtgtggaaatttggagaagttgcggcagagaagccatgcgttccagcattccacggtccagctagtgccgctcagccctagaccctgactttgcaggctcagctgctgttctaacctcaggaatgcatctacctgagaggctcctgctgtccacgccctcagccaattccttctccccgccttggccacgtgtagccccagctgtctgcaggcaccaggctgggatgagctgtgtgcttgcgggtgcgtgtgtgtgtacgtgtctccaggtggccgctggtctcccgctgtgttcaggaggccacatatacagcccctcccagccacacctgcccctgctctggggcctgctgagccggctgccctgggcacccggttccaggcagcacagacgtggggcatccccagaaagactccatcccaggaccaggttcccctgcgtgctcttcgagagggtgtcagtgagcagactgcaccccaagctcccgactccaggtcccctgatcttggggcctgtttcccatgggattcaagagggacagccccagctttgtgtgtgtttaagcttaggaatcgcctttatggaaagggctatgtgggagagtcagctatcttgtctggttttcttgagacctcagatgtgtgttcagcagggctgaaagcttttattctttaataatgagaaatgtatattttactaataaattattgaccgagttctgtaaaaaaaaaaaaaaaa

SEQ ID NO: 2 - DNA, 2033 bp, Homo sapiens
gcacataacgggcagaacgcactgcgaagcggcttcttcagagcacgggctggaactggcaggcaccgcgagcccctagcacccgacaagctgagtgtgcaggacgagtccccaccacacccacaccacagccgctgaatgaggcttccaggcgtccgctcgcggcccgcagagccccgccgtgggtccgcccgctgaggcgcccccagccagtgcgctcacctgccagactgcgcgccatggggcaacccgggaacggcagcgccttcttgctggcacccaatagaagccatgcgccggaccacgacgtcacgcagcaaagggacgaggtgtgggtggtgggcatgggcatcgtcatgtctctcatcgtcctggccatcgtgtttggcaatgtgctggtcatcacagccattgccaagttcgagcgtctgcagacggtcaccaactacttcatcacttcactggcctgtgctgatctggtcatgggcctggcagtggtgccctttggggccgcccatattcttatgaaaatgtggacttttggcaacttctggtgcgagttttggacttccattgatgtgctgtgcgtcacggccagcattgagaccctgtgcgtgatcgcagtggatcgctactttgccattacttcacctttcaagtaccagagcctgctgaccaagaataaggcccgggtgatcattctgatggtgtggattgtgtcaggccttacctccttcttgcccattcagatgcactggtaccgggccacccaccaggaagccatcaactgctatgccaatgagacctgctgtgacttcttcacgaaccaagcctatgccattgcctcttccatcgtgtccttctacgttcccctggtgatcatggtcttcgtctactccagggtctttcaggaggccaaaaggcagctccagaagattgacaaatctgagggccgcttccatgtccagaaccttagccaggtggagcaggatgggcggacggggcatggactccgcagatcttccaagttctgcttgaaggagcacaaagccctcaagacgttaggcatcatcatgggcactttcaccctctgctggctgcccttcttcatcgttaacattgtgcatgtgatccaggataacctcatccgtaaggaagtttacatcctcctaaattggataggctatgtcaattctggtttcaatccccttatctactgccggagcccagatttcaggattgccttccaggagcttctgtgcctgcgcaggtcttctttgaaggcctatgggaatggctactccagcaacggcaacacaggggagcagagtggatatcacgtggaacaggagaaagaaaataaactgctgtgtgaagacctcccaggcacggaagactttgtgggccatcaaggtactgtgcctagcgataacattgattcacaagggaggaattgtagtacaaatgactcactgctgtaaagcagtttttctacttttaaagacccccccccccaacagaacactaaacagactatttaacttgagggtaataaacttagaataaaattgtaaaattgtatagagatatgcagaaggaagggcatccttctgccttttttatttttttaagctgtaaaaagagagaaaacttatttgagtgattatttgttatttgtacagttcagttcctctttgcatggaatttgtaagtttatgtctaaagagctttagtcctagaggacctgagtctgctatattttcatgacttttccatgtatctacctcactattcaagtattaggggtaatatattgctgctggtaatttgtatctgaaggagattttccttcctacacccttggacttgaggattttgagtatctcggacctttcagctgtgaacatggactcttcccccactcctcttatttgctcacacggggtattttaggcagggatttgaggagcagcttcagttgttttcccgagcaaagtctaaagtttacagtaaataaattgtttgaccatgcc

SEQ ID NO: 3 - DNA, 1967 bp, Homo sapiens
ataaaaaccgtcctcgggcgcggcggggagaagccgagctgagcggatcctcacacgactgtgatccgattctttccagcggcttctgcaaccaagcgggtcttacccccggtcctccgcgtctccagtcctcgcacctggaaccccaacgtccccgagagtccccgaatccccgctcccaggctacctaagaggatgagcggtgctccgacggccggggcagccctgatgctctgcgccgccaccgccgtgctactgagcgctcagggcggacccgtgcagtccaagtcgccgcgctttgcgtcctgggacgagatgaatgtcctggcgcacggactcctgcagctcggccaggggctgcgcgaacacgcggagcgcacccgcagtcagctgagcgcgctggagcggcgcctgagcgcgtgcgggtccgcctgtcagggaaccgaggggtccaccgacctcccgttagcccctgagagccgggtggaccctgaggtccttcacagcctgcagacacaactcaaggctcagaacagcaggatccagcaactcttccacaaggtggcccagcagcagcggcacctggagaagcagcacctgcgaattcagcatctgcaaagccagtttggcctcctggaccacaagcacctagaccatgaggtggccaagcctgcccgaagaaagaggctgcccgagatggcccagccagttgacccggctcacaatgtcagccgcctgcaccggctgcccagggattgccaggagctgttccaggttggggagaggcagagtggactatttgaaatccagcctcaggggtctccgccatttttggtgaactgcaagatgacctcagatggaggctggacagtaattcagaggcgccacgatggctcagtggacttcaaccggccctgggaagcctacaaggcggggtttggggatccccacggcgagttctggctgggtctggagaaggtgcatagcatcacgggggaccgcaacagccgcctggccgtgcagctgcgggactgggatggcaacgccgagttgctgcagttctccgtgcacctgggtggcgaggacacggcctatagcctgcagctcactgcacccgtggccggccagctgggcgccaccaccgtcccacccagcggcctctccgtacccttctccacttgggaccaggatcacgacctccgcagggacaagaactgcgccaagagcctctctggaggctggtggtttggcacctgcagccattccaacctcaacggccagtacttccgctccatcccacagcagcggcagaagcttaagaagggaatcttctggaagacctggcggggccgctactacccgctgcaggccaccaccatgttgatccagcccatggcagcagaggcagcctcctagcgtcctggctgggcctggtcccaggcccacgaaagacggtgactcttggctctgcccgaggatgtggccgttccctgcctgggcaggggctccaaggaggggccatctggaaacttgtggacagagaagaagaccacgactggagaagccccctttctgagtgcaggggggctgcatgcgttgcctcctgagatcgaggctgcaggatatgctcagactctagaggcgtggaccaaggggcatggagcttcactccttgctggccagggagttggggactcagagggaccacttggggccagccagactggcctcaatggcggactcagtcacattgactgacggggaccagggcttgtgtgggtcgagagcgccctcatggtgctggtgctgttgtgtgtaggtcccctggggacacaagcaggcgccaatggtatctgggcggagctcacagagttcttggaataaaagcaacctcagaacacttaaaaaaaaaaaaaaaaaaaaaaaaaaaaaaaaaaaaaaaaaaaaaaaaaaaaaaaaaaaaaaaa

SEQ ID NO: 4 - DNA, 1930 bp, Homo sapiens
gaccaagtggctcctgcgatggcggcggaagaggaggctgcggcgggaggtaaagtgttgagagaggagaaccagtgcattgctcctgtggtttccagccgcgtgagtccagggacaagaccaacagctatggggtctttcagctcacacatgacagagtttccacgaaaacgcaaaggaagtgattcagacccatcccagtcaggaatcatgacagaaaaagtggtggaaaagctttctcagaatccccttacctatcttctttcaacaaggatagaaatatcagcctccagtggcagcagagtggaagatggtgaacaccaagttaaaatgaaggccttcagagaagctcatagccaaactgaaaagcggaggagagataaaatgaataacctgattgaagaactgtctgcaatgatccctcagtgcaaccccatggcgcgtaaactggacaaacttacagttttaagaatggctgttcaacacttgagatctttaaaaggcttgacaaattcttatgtgggaagtaattatagaccatcatttcttcaggataatgagctcagacatttaatccttaagactgcagaaggcttcttatttgtggttggatgtgaaagaggaaaaattctcttcgtttctaagtcagtctccaaaatacttaattatgatcaggctagtttgactggacaaagcttatttgacttcttacatccaaaagatgttgccaaagtaaaggaacaactttcttcttttgatatttcaccaagagaaaagctaatagatgccaaaactggtttgcaagttcacagtaatctccacgctggaaggacacgtgtgtattctggctcaagacgatcttttttctgtcggataaagagttgtaaaatctctgtcaaagaagagcatggatgcttacccaactcaaagaagaaagagcacagaaaattctatactatccattgcactggttacttgagaagctggcctccaaatattgttggaatggaagaagaaaggaacagtaagaaagacaacagtaattttacctgccttgtggccattggaagattacagccatatattgttccacagaacagtggagagattaatgtgaaaccaactgaatttataacccggtttgcagtgaatggaaaatttgtctatgtagatcaaagggcaacagcgattttaggatatctgcctcaggaacttttgggaacttcttgttatgaatattttcatcaagatgaccacaataatttgactgacaagcacaaagcagttctacagagtaaggagaaaatacttacagattcctacaaattcagagcaaaagatggctcttttgtaactttaaaaagccaatggtttagtttcacaaatccttggacaaaagaactggaatatattgtatctgtcaacactttagttttgggacatagtgagcctggagaagcatcatttttaccttgtagctctcaatcatcagaagaatcctctagacagtcctgtatgagtgtacctggaatgtctactggaacagtacttggtgctggtagtattggaacagatattgcaaatgaaattctggatttacagaggttacagtcttcttcataccttgatgattcgagtccaacaggtttaatgaaagatactcatactgtaaactgcaggagtatgtcaaataaggagttgtttccaccaagtccttctgaaatgggggagctagaggctaccaggcaaaaccagagtactgttgctgtccacagccatgagccactcctcagtgatggtgcacagttggatttcgatgccctatgtgacaatgatgacacagccatggctgcatttatgaattacttagaagcagaggggggcctgggagaccctggggacttcagtgacatccagtggaccctctagc

SEQ ID NO: 5 - DNA, 1067 bp, Homo sapiens
ggcggacgctccacgtgtccctcgccgcgccccgtctacccgcccctgccctgaggaccctagtccaacatggcggcgcccagcggagggtggaacggcgtcggcgcgagcttgtgggccgcgctgctcctaggggccgtggcgctgaggccggcggaggcggtgtccgagcccacgacggtggcgtttgacgtgcggcccggcggcgtcgtgcattccttctcccataacgtgggcccgggggacaaatatacgtgtatgttcacttacgcctctcaaggagggaccaatgagcaatggcagatgagtctggggaccagcgaagaccaccagcacttcacctgcaccatctggaggccccaggggaagtcctatctgtacttcacacagttcaaggcagaggtgcggggcgctgagattgagtacgccatggcctactctaaagccgcatttgaaagggaaagtgatgtccctctgaaaactgaggaatttgaagtgaccaaaacagcagtggctcacaggcccggggcattcaaagctgagctgtccaagctggtgattgtggccaaggcatcgcgcactgagctgtgaccagcagccctgttgcgggtggcaccttctcatctccggtgaagctgaaggggcctgtgtccctgaaagggccagcacatcactggttttctaggagggactcttaagttttctacctgggctgacgttgccttgtccggaggggcttgcagggtggctgaagccctggggcagagaacagagggtccagggccctcctggctcccaacagcttctcagttcccacttcctgctgagctcttctggactcaggatcgcagatccggggcacaaagagggtggggaacatgggggctatgctggggaaagcagccatgctccccccgacctccagccgagcatccttcatgagcctgcagaactgctttcctatgtttacccaggggacctcctttcagatgaactgggaagagatgaaatgttttttcatatttaaataaataagaacattaaaaagcaaaaaaaaaaaaaaaaaa

SEQ ID NO: 6 - DNA, 5167 bp, Homo sapiens
ctggagtctcccctggtcgggagcctcagccttctggagactgacaccaccctcttactcagagacgaatcgttttgtcgttgccttcacctccctgaccacaagtgctccggggctctttctgagggaggcagctgttctaggcgggaggctggagtctcctgggcctggacgcaccccggggtgtgagtgatgggtatgcctgaaaggaggggaagtggcgcggctttaatcatctgggctagtccccggcgggcctgggggaacagggaaactggaggcggccttaaagcgtcaggatgagacatcgcaagaggagctgcagatactgagcgtgcgccccgggttctcgccgccttctctccgccgagcagcccttcggccaccctttgcccttaaaaatctgcagactgcgcctcctctccgcgggagcgagacctagcaggcccggggctgggcgtgccctcgcctgccacgctgcgcgctgccctcagccgggccgctggggccgtgcagtgcaccgggcacgccgcgccaggctgggggcaggcaccgagcctccgtgggaggtcccgaggcagcttcgcctgctcgccctggctccagccctcacctgccgcagccttagctgagcagccgccgccactgggcgccccccgctccccacttcgccagcgcccgctcctcggctcggcccggggtagtttgtagggacgcagctctccacgtgcgcgactgcgaggctggacgctacgggctcctggaaaggagacaccagcatttgccacaatgctgtcatccactgactttacatttgcttcctgggagcttgtggtccgcgttgaccatcccaatgaagagcagcagaaagacgtcacactgagagtatctggagaccttcatgttggaggagtgatgctcaagttagtagaacagatcaatatatcccaagactggtcagactttgctctttggtgggaacagaagcattgctggcttctgaaaacccactggaccctggacaaatatggggtccaggcagatgcaaagcttctcttcacccctcagcataaaatgctgcgccttcgtctgccgaatttgaagatggtgaggttgcgagtcagcttctcagctgtggtttttaaagctgtcagtgatatctgcaaaatcctgaatattagaagatcagaagagctttccttgttaaagccgtctggtgactattttaagaagaagaagaaaaaagacaaaaataataaggaacccataattgaagatattctaaacctggagagttctccaacagcttcaggttcatcagtaagtcctggtttatacagtaaaaccatgacccctatatatgaccccatcaatggaacaccagcatcatccaccatgacttggttcagtgacagccctttgacggaacaaaactgcagcatcctcgcattcagccaacccccccagtccccagaagcacttgcggatatgtaccagcctcggtctctggttgataaagccaagctcaatgcaggttggctagactcctcacgctcccttatggaacaaggcatccaagaggatgagcagctgctcttacgatttaaatattattctttcttcgacttgaatcctaaatatgatgctgtccgaataaaccaactctatgagcaagccaggtgggccattctcttagaagaaattgattgcacagaggaagaaatgttgatctttgcagctctacagtaccacattagcaaactgtcgttgtctgctgaaacacaggattttgcaggcgagtccgaggttgatgaaatagaagcggcgctttctaatttggaagtaaccctagaaggtggaaaagcggacagccttttggaggacattactgatatccctaaacttgcagataatctcaaattatttaggcccaagaagttactaccaaaagctttcaaacaatattggtttatctttaaagacacatccatagcatactttaaaaataaggaacttgaacaaggagaaccactagaaaaactaaatcttagaggctgcgaagttgtgcccgatgtaaatgtagcaggaagaaaatttggaatcaagttactaatccctgttgccgatggtatgaatgaaatgtatttgagatgtgaccatgagaatcaatacgcccaatggatggctgcctgcatgttggcatcgaagggcaaaaccatggcagacagctcctaccagccagaggtcctcaacatcctttcatttctgaggatgaaaaacaggaactctgcatctcaggtggcttccagtctcgaaaacatggatatgaacccagaatgttttgtgtcaccacggtgtgcaaaaagacacaaatccaaacagctggccgcccggatcctggaggcgcaccagaacgtggcccagatgcccctggtcgaagccaagctgcggttcatccaggcgtggcagtcactgcctgagtttggcctcacctactaccttgtcagatttaaaggaagcaaaaaagatgacattctgggagtttcatataacaggttgattaaaattgatgcagccaccgggattccagtgacaacatggagattcacaaatatcaaacagtggaatgtaaactgggaaacccggcaggtggtcatcgagtttgaccaaaacgtctttactgctttcacctgcctgagtgcagattgcaagattgtgcacgagtacattggcggctacattttcttgtccacccgctccaaggaccagaatgaaacactcgatgaggacttgttccacaaattgaccggcggtcaggattgaaacaagcacgcgtgctcggctcacaccaacaaggcaagccaaaggcgcccctccccagagggatccctaacgtgcccagcatgtagattctggactaacagacaacatacattcaccgctggtcacccagatcctcattcaaacccactgctggcacatccctttccttactttgccctgtgctaccagccacggaaggagcctctcttgttttttctataaaatgggtaggcaggagaaaagcaggtgccctaagattgctctaaggcccagcatgtggttacagttctctgacttgcagaacctgccaggtgtatggctacaagttatcctcgtgctgatctgtctcattactaagtcaatggagaagacagaaaggtaaaaatcacgtgtagcaagaacaactcttatttcacaaactcaggtatgaaacgaaacgcctgtccttcatggaactgcttttagctcctgtcttttcaaaatggcagagggagttcctacacacactttttccctggaggccaaggtctaggggtagaaaggggaggggtggggctaccaggtagcagttgacaacccaaggtcagaggagtggccctcagtgtcatctgtccacagtgatacctgccaagatgaccactgacccacatctggtcttagtcattggtctcctcagatttctggggccacctgcaagccccattccattcctacagatctctcagccacctgtaagtcctttgtgaagatgtgggtgacacagggggacaggaaaacccatttctcaacccagatccatgtctccactgcttctactctgggttgggattcaggaagacaggcacagtcctctctgttcatagaaacacctgccagtgtcaaggattccagtcaggtgtctatcccaactggtcagggagagaagggcagacccattctcaaagaccaccatgtccaaggtctgacagctccccactggctgcccccacaggggctttaggctggtctgggtcatggggaagcgtccctcttatcgctggtctgtgttctcctggatttggtatctatgttggtacgactcctggccttttatctaaaggactttggcttttgtaaatcacaagccaataatagacttttttctccccctctgttttttgctgtgtcatctctgccttgagactgccttgagacagtgcttgccttgagagagtgagccaattaacagctgcctgaattgtcattttccattttggtttgttagaggtgggaggggtgggttttgagaaggtcaaaagcaataccagaagtaaagggaaatatcagacaatattttattattttttcatagatgttctgccacacaaagaacttggggtgtaaggataaggcaaaagctccaatcccatttttcagttctcctaggatgcacccctcagggagcctggccagagttccgaggcccgtgagcgtcagctgttgctttattttccatcaaagccctctgagaagtgagacctcagcaattccgggagccacatagagacagacttggcaagggaccccctggttctgagccagtagctgccatctggaaattcctcttttagcctctccttagaggtgaatgtgaatgaagcctcccaggcacccgctgaatttctgaggccttgcttaaagctcagaagtggtttaggcatttggaaaatctggttcacatcataaagaacttgatttgaaatgttttctatagaaacaagtgctaagtgtaccgtatatacttgatgttggtcatttctcagtcctatttctcagttctattattttagaacctagtcagttctttaagattataactggtcctacattaaaataatgcttctcgatgtcagattttacctgtttgctgctgagaacatctctgcctaatttaccaaagccagaccttcagttcaacatgcttccttagcttttcatagttgtctgacatttccatgaaaacaaaggaaccaactttgttttaaccaaactttgtttggttacagttttcaggggagcgtttcttccatgacacacagcaacatcccaaagaaataaacaagtgtgacaaaaaaaaaaaaaaacaaacctaaatgctactgttccaaagagcaacttgatggttttttttaatactgagtgcaaaaggtcacccaaattcctatgatgaaattttaaattaatgggcacctttcaacatcatttgcttccttatctacagttgattcagaaatctgcattttttattcttttatatgacttttaagtaaaagatttatatggatttgaaaaaaaaaaaaaaaaa

SEQ ID NO: 7 - DNA, 1128 bp, Homo sapiens
agtccgagtggagagagcgagctgagtggttgtgtggtcgcgtctcggaaaccggtagcgcttgcagcatggctgaccaactgactgaagagcagattgcagaattcaaagaagctttttcactatttgacaaagatggtgatggaactataacaacaaaggaattgggaactgtaatgagatctcttgggcagaatcccacagaagcagagttacaggacatgattaatgaagtagatgctgatggtaatggcacaattgacttccctgaatttctgacaatgatggcaagaaaaatgaaagacacagacagtgaagaagaaattagagaagcattccgtgtgtttgataaggatggcaatggctatattagtgctgcagaacttcgccatgtgatgacaaaccttggagagaagttaacagatgaagaagttgatgaaatgatcagggaagcagatattgatggtgatggtcaagtaaactatgaagagtttgtacaaatgatgacagcaaagtgaagaccttgtacagaatgtgttaaatttcttgtacaaaattgtttatttgccttttctttgtttgtaacttatctgtaaaaggtttctccctactgtcaaaaaaatatgcatgtatagtaattaggacttcattcctccatgttttcttcccttatcttactgtcattgtcctaaaaccttattttagaaaattgatcaagtaacatgttgcatgtggcttactctggatatatctaagcccttctgcacatctaaacttagatggagttggtcaaatgagggaacatctgggttatgccttttttaaagtagttttctttaggaactgtcagcatgttgttgttgaagtgtggagttgtaactctgcgtggactatggacagtcaacaatatgtacttaaaagttgcactattgcaaaacgggtgtattatccaggtactcgtacactatttttttgtactgctggtcctgtaccagaaacattttcttttattgttacttgctttttaaactttgtttagccacttaaaatctgcttatggcacaatttgcctcaaaatccattccaagttgtatatttgttttccaataaaaaaattacaatttaccc

SEQ ID NO: 8 - DNA, 3320 bp, Homo sapiens
gtgggtgagcggcggccacggcatcctgtgctgtgggggctacgaggaaagatctaattatcatggacctgcgacagtttcttatgtgcctgtccctgtgcacagcctttgccttgagcaaacccacagaaaagaaggaccgtgtacatcatgagcctcagctcagtgacaaggttcacaatgatgctcagagttttgattatgaccatgatgccttcttgggtgctgaagaagcaaagacctttgatcagctgacaccagaagagagcaaggaaaggcttggaaagattgtaagtaaaatagatggcgacaaggacgggtttgtcactgtggatgagctcaaagactggattaaatttgcacaaaagcgctggatttacgaggatgtagagcgacagtggaaggggcatgacctcaatgaggacggcctcgtttcctgggaggagtataaaaatgccacctacggctacgttttagatgatccagatcctgatgatggatttaactataaacagatgatggttagagatgagcggaggtttaaaatggcagacaaggatggagacctcattgccaccaaggaggagttcacagctttcctgcaccctgaggagtatgactacatgaaagatatagtagtacaggaaacaatggaagatatagataagaatgctgatggtttcattgatctagaagagtatattggtgacatgtacagccatgatgggaatactgatgagccagaatgggtaaagacagagcgagagcagtttgttgagtttcgggataagaaccgtgatgggaagatggacaaggaagagaccaaagactggatccttccctcagactatgatcatgcagaggcagaagccaggcacctggtctatgaatcagaccaaaacaaggatggcaagcttaccaaggaggagatcgttgacaagtatgacttatttgttggcagccaggccacagattttggggaggccttagtacggcatgatgagttctgagctgcggaggaaccctcatttcctcaaaagtaatttatttttacagcttctggtttcacatgaaattgtttgcgctactgagactgttactacaaactttttaagacatgaaaaggcgtaatgaaaaccatcccgtccccattcctcctcctctctgagggactggagggaagccgtgcttctgaggaacaactctaattagtacacttgtgtttgtagatttacactttgtattatgtattaacatggcgtgtttatttttgtatttttctctggttgggagtatgatatgaaggatcaagatcctccactcacacatgtagacaaacattagctctttactctttctcaaccccttatatgattttaataattctcacttcactaattttgtaagcctgagatcaataagaaatgttcaggagagaggaaagaaaaaatatatatgctccacaatttatatttagagagagaacacttagtcttgcctgtcaaaaagtccaacatttcataggtagtaggggccacatattacattcagttgctataggtccagcaactgaacctgccattacctgggcaaggaaagatccctttgctctaggaaagcttggcccaaattgattttcttctttttccccctgtaggactgactgttggctaattttgtcaagcacagctgtggtgggaagagttagggccagtgtcttgaaaatcaatcaagtagtgaatgtgatctctttgcagagctatagatagaaacagctggaaaactaaaggaaaaatacaaatgttttcggggcatacattttttttctgggtgtgcatctgttgaaatgctcaagacttaattatttgccttttgaaatcactgtaaatgcccccatccggttcctcttcttcccaggtgtgccaaggaattaatcttggtttcactacaattaaaattcactcctttccaatcatgtcattgaaagtgcctttaacgaaagaaatggtcactgaatgggaattctcttaagaaaccctgagattaaaaaaagactatttggataacttataggaaagcctagaacctcccagtagagtggggatttttttcttcttccctttctcttttggacaatagttaaattagcagtattagttatgagtttggttgcagtgttcttatcttgtgggctgatttccaaaaaccacatgctgctgaatttaccagggatcctcatacctcacaatgcaaaccacttactaccaggcctttttctgtgtccactggagagcttgagctcacactcaaagatcagaggacctacagagagggctctttggtttgaggaccatggcttacctttcctgcctttgacccatcacaccccatttcctcctctttccctctccccgctgccaaaaaaaaaaaaaaggaaacgtttatcatgaatcaacagggtttcagtccttatcaaagagagatgtggaaagagctaaagaaaccaccctttgttcccaactccactttacccatattttatgcaacacaaacactgtccttttgggtccctttcttacagatggacctcttgagaagaattatcgtattccacgtttttagccctcaggttaccaagataaatatatgtatatataacctttattattgctatatctttgtggataatacattcaggtggtgctgggtgatttattataatctgaacctaggtatatcctttggtcttccacagtcatgttgaggtgggctccctggtatggtaaaaagccaggtataatgtaacttcaccccagcctttgtactaagctcttgatagtggatatactcttttaagtttagccccaatatagggtaatggaaatttcctgccctctgggttccccatttttactattaagaagaccagtgataatttaataatgccaccaactctggcttagttaagtgagagtgtgaactgtgtggcaagagagcctcacacctcactaggtgcagagagcccaggccttatgttaaaatcatgcacttgaaaagcaaaccttaatctgcaaagacagcagcaagcattatacggtcatcttgaatgatccctttgaaattttttttttgtttgtttgtttaaatcaagcctgaggctggtgaacagtagctacacacccatattgtgtgttctgtgaatgctagctctcttgaatttggatattggttattttttatagagtgtaaaccaagttttatattctgcaatgcgaacaggtacctatctgtttctaaataaaactgtttacattcaaaaa

SEQ ID NO: 9 - DNA, 2758 bp, Homo sapiens
agcagctcttaaagctttggattcggctgtcgtggagataacgggcaccagaaaaacttgtaggagtagcaacagctatttggtcggatggaggccagaagccaagaataatcgaaacacgctgccagcgcccattagatggatgggaaatgagtgtaactcattgggaaagatattagacttcaaatcacctaaggcaaaccctacttcctggggcgcgggcgcgggcgctggcgttaggagacgtcactcccgcgcataactgacatggggccctcttggtcggcgtttccgggcgggtccttccgacggccgccgcggtgattccatcactcggctttcttcccggcctgcctcgcgcccgtagccgggctgggccagaacagcccaagatggccgacttcgatgatcgtgtgtcggatgaggagaaggtacgcatagctgctaaattcatcactcatgcacccccaggggaatttaatgaagtattcaatgacgttcggctactacttaataatgacaatctcctcagggaaggggcagcacatgcatttgcccagtataacatggatcagttcacgcctgtgaagatagaaggatatgaagatcaggtcttaattacagagcacggtgacctgggtaatagcagatttttagatccaagaaacaaaatttcctttaaatttgaccacttacggaaagaagcaagtgacccccagccagaagaagcagatggaggtctgaagtcttggagagaatcctgtgacagtgctttaagagcctatgtgaaagaccattattccaacggcttctgtactgtttatgctaaaactatcgatgggcaacagactattattgcatgtattgaaagccaccagtttcagcctaaaaacttctggaatggtcgttggagatcagagtggaagttcaccatcacaccacctacagcccaggtggttggcgtgcttaagattcaggttcactattatgaagatggcaatgttcagttggttagtcataaagatgtacaggattcactaactgtttcgaatgaagcccaaactgccaaggagtttattaaaatcatagagaatgcagaaaatgagtatcagacagcaattagtgaaaactatcaaacaatgtcagataccacattcaaggccttgcgccggcagcttccagttacccgcaccaaaatcgactggaacaagatactcagctacaagattggcaaagaaatgcagaatgcttaaaggctgaatgtaggattcttcagtatgtggaaagacaaggattcaacgtgtggtcatatgataaataagtgatttataaacaagagtgatattttgctagggctttcaaagttaaccggttttctagcctcatggaatactgttgaacctatagcgttgtcttgattcttttgtgttctctgccttgtaattttctgttactgctatatctacgtgtaaatctttttttctttttttttttttttttttggttaattctgccacatttaatgttggtgagagagtgatctatcctaatgacattttactgtttaaaaaagtttcctagccatgaagccctgctactgatttagacaaggtattatggtcattactttgtacccctatccttccaagcacttctggtacttcagtcgtttttactgatccaccaacacctaaagaggctatgctacagtctctagctaaatggaagacacattcatccttctccctctgactgctttgatcatcatttattgcatctcataactaattttctaaagtttggattgggacttttcaggtcctttttggagggcaaaggaagtgccagcttctctggggaacttgtttttaaatccaaagacttgaaccacattccctgcacatgaacatgtttgcttttatcccttctctcattgtctccttcccatcttagtaccattgtagttataaacatctgcattttttagaagcattttacccatttatttttttaaacattcaagaactgctgacgtactgtggatgtagagtataaaacttgaaaaatgcagatgttgaaggaataataggtatcttgtgctttaatactttatggcaggattgtactataagcaaatgaattaaacagctatgtaaatcataaagaaaaactaaaaatgaaccaaagtgaaaggataacttccaggcagtatctttctattgtaacctgttatttaaggaaatactagtgatttcttctaaataggatgtaaaacttctttcaaattactcttcctcagtcctgcctgccaagaactcaagtgtaactgtgataaaataacctttcccaggtatattggcaggtatgtgtgtaatctcagaatacacaggtgacatagatatgatatgacaactggtaatggtggattcatttacattgtttacacttctatgaccaggccttaagggaaggtcagttttttaaaaaaccaagtagtgtcttcctacctatctccagatacatgtcaaaaaaagaaaggtgtttgtgcttccgttttgtttctgctcagtaatatagtcaagcaagtttgttccaggtgacccattgagctgtgtatgcatttttgtttatttcaataaaatatatttgtattatttgtccttcatactatccatccataccacactatcttctgtatcaggtagtctaatagaaatatacctgttttgttctaaaattgaaaaaaaaaaaaaaaaaa

SEQ ID NO: 10 - DNA, 799 bp, Homo sapiens
cactcccaaagaactgggtactcaacactgagcagatctgttctttgagctaaaaaccatgtgctgtaccaagagtttgctcctggctgctttgatgtcagtgctgctactccacctctgcggcgaatcagaagcagcaagcaactttgactgctgtcttggatacacagaccgtattcttcatcctaaatttattgtgggcttcacacggcagctggccaatgaaggctgtgacatcaatgctatcatctttcacacaaagaaaaagttgtctgtgtgcgcaaatccaaaacagacttgggtgaaatatattgtgcgtctcctcagtaaaaaagtcaagaacatgtaaaaactgtggcttttctggaatggaattggacatagcccaagaacagaaagaaccttgctggggttggaggtttcacttgcacatcatggagggtttagtgcttatctaatttgtgcctcactggacttgtccaattaatgaagttgattcatattgcatcatagtttgctttgtttaagcatcacattaaagttaaactgtattttatgttatttatagctgtaggttttctgtgtttagctatttaatactaattttccataagctattttggtttagtgcaaagtataaaattatatttgggggggaataagattatatggactttcttgcaagcaacaagctattttttaaaaaaactatttaacattcttttgtttatattgttttgtctcctaaattgttgtaattgcattataaaataagaaaaacattaataagacaaatatt

SEQ ID NO: 11 - DNA, 1553 bp, Homo sapiens
cgaggctccgcaccagccgcgcttctgtccgcctgcagggcattccagaaagatgaggatatttgctgtctttatattcatgacctactggcatttgctgaacgcatttactgtcacggttcccaaggacctatatgtggtagagtatggtagcaatatgacaattgaatgcaaattcccagtagaaaaacaattagacctggctgcactaattgtctattgggaaatggaggataagaacattattcaatttgtgcatggagaggaagacctgaaggttcagcatagtagctacagacagagggcccggctgttgaaggaccagctctccctgggaaatgctgcacttcagatcacagatgtgaaattgcaggatgcaggggtgtaccgctgcatgatcagctatggtggtgccgactacaagcgaattactgtgaaagtcaatgccccatacaacaaaatcaaccaaagaattttggttgtggatccagtcacctctgaacatgaactgacatgtcaggctgagggctaccccaaggccgaagtcatctggacaagcagtgaccatcaagtcctgagtggtaagaccaccaccaccaattccaagagagaggagaagcttttcaatgtgaccagcacactgagaatcaacacaacaactaatgagattttctactgcacttttaggagattagatcctgaggaaaaccatacagctgaattggtcatcccagaactacctctggcacatcctccaaatgaaaggactcacttggtaattctgggagccatcttattatgccttggtgtagcactgacattcatcttccgtttaagaaaagggagaatgatggatgtgaaaaaatgtggcatccaagatacaaactcaaagaagcaaagtgatacacatttggaggagacgtaatccagcattggaacttctgatcttcaagcagggattctcaacctgtggtttaggggttcatcggggctgagcgtgacaagaggaaggaatgggcccgtgggatgcaggcaatgtgggacttaaaaggcccaagcactgaaaatggaacctggcgaaagcagaggaggagaatgaagaaagatggagtcaaacagggagcctggagggagaccttgatactttcaaatgcctgaggggctcatcgacgcctgtgacagggagaaaggatacttctgaacaaggagcctccaagcaaatcatccattgctcatcctaggaagacgggttgagaatccctaatttgagggtcagttcctgcagaagtgccctttgcctccactcaatgcctcaatttgttttctgcatgactgagagtctcagtgttggaacgggacagtatttatgtatgagtttttcctatttattttgagtctgtgaggtcttcttgtcatgtgagtgtggttgtgaatgatttcttttgaagatatattgtagtagatgttacaattttgtcgccaaactaaacttgctgcttaatgatttgctcacatctagtaaaacatggagtatttgtaaaaaaaaaaaaaaa

SEQ ID NO: 12 - DNA, 6017 bp, Homo sapiens
gggcggggctcgggccggtccgcccgcgcgcaggtgagtgagccagggcggagcgcagctgcgccgggcttgggcgcctggggccgccgctccccaccgtcgttttccccaccgaggccgaggcgtcccggagtcatggccggcctgaactgcggggtctctatcgcactgctaggggttctgctgctgggtgcggcgcgcctgccgcgcggggcagaagcttttgagattgctctgccacgagaaagcaacattacagttctcataaagctggggaccccgactctgctggcaaaaccctgttacatcgtcatttctaaaagacatataaccatgttgtccatcaagtctggagaaagaatagtctttacctttagctgccagagtcctgagaatcactttgtcatagagatccagaaaaatattgactgtatgtcaggcccatgtccttttggggaggttcagcttcagccctcgacatcgttgttgcctaccctcaacagaactttcatctgggatgtcaaagctcataagagcatcggtttagagctgcagttttccatccctcgcctgaggcagatcggtccgggtgagagctgcccagacggagtcactcactccatcagcggccgaatcgatgccaccgtggtcaggatcggaaccttctgcagcaatggcactgtgtcccggatcaagatgcaagaaggagtgaaaatggccttacacctcccatggttccaccccagaaatgtctccggcttcagcattgcaaaccgctcatctataaaacgtctgtgcatcatcgagtctgtgtttgagggtgaaggctcagcaaccctgatgtctgccaactacccagaaggcttccctgaggatgagctcatgacgtggcagtttgtcgttcctgcacacctgcgggccagcgtctccttcctcaacttcaacctctccaactgtgagaggaaggaggagcgggttgaatactacatcccgggctccaccaccaaccccgaggtgttcaagctggaggacaagcagcctgggaacatggcggggaacttcaacctctctctgcaaggctgtgaccaagatgcccaaagtccagggatcctccggctgcagttccaagttttggtccaacatccacaaaatgaaagcaataaaatctacgtggttgacttgagtaatgagcgagccatgtcactcaccatcgagccacggcccgtcaaacagagccgcaagtttgtccctggctgtttcgtgtgtctagaatctcggacctgcagtagcaacctcaccctgacatctggctccaaacacaaaatctccttcctttgtgatgatctgacacgtctgtggatgaatgtggaaaaaaccataagctgcacagaccaccggtactgccaaaggaaatcctactcactccaggtgcccagtgacatcctccacctgcctgtggagctgcatgacttctcctggaagctgctggtgcccaaggacaggctcagcctggtgctggtgccagcccagaagctgcagcagcatacacacgagaagccctgcaacaccagcttcagctacctcgtggccagtgccatacccagccaggacctgtacttcggctccttctgcccgggaggctctatcaagcagatccaggtgaagcagaacatctcggtgacccttcgcacctttgcccccagcttccaacaagaggcctccaggcagggtctgacggtgtcctttataccttatttcaaagaggaaggcgttttcacggtgacccctgacacaaaaagcaaggtctacctgaggacccccaactgggaccggggcctgccatccctcacctctgtgtcctggaacatcagcgtgcccagagaccaggtggcctgcctgactttctttaaggagcggagcggcgtggtctgccagacagggcgcgcattcatgatcatccaggagcagcggacccgggctgaggagatcttcagcctggacgaggatgtgctccccaagccaagcttccaccatcacagcttctgggtcaacatctctaactgcagccccacgagcggcaagcagctagacctgctcttctcggtgacacttaccccaaggactgtggacttgactgtcatcctcatcgcagcggtgggaggtggagtcttactgctgtctgccctcgggctcatcatttgctgtgtgaaaaagaagaaaaagaagacaaacaagggccccgctgtgggtatctacaatgacaacatcaatactgagatgccgaggcagccaaaaaagtttcagaaagggcgaaaggacaatgactcccatgtgtatgcagtcatcgaggacaccatggtatatgggcatctgctacaggattccagcggctccttcctgcagccagaggtggacacctaccggccgttccagggcaccatgggggtctgtcctccctccccacccaccatatgctccagggccccaactgcaaagttggccactgaggagccacctcctcgctcccctcctgagtctgagagtgaaccgtacaccttctcccatcccaacaatggggatgtaagcagcaaggacacagacattcccttactgaacactcaggagcccatggagccagcagaataacttgatccattccagacgctttgctgagtttcataaagcagggcactgagacacccgtccgtgttcctaaccagaaatcctaaagaagaggaattatacagaaggaacagcaggaggttttcctggacaccgccaacttcacattgctcagtggactcattctaagggcaagacattgaaaatgatgaattccaatctggatacagtcatgacagctcatgtgctcctcaacttaggctgtgcggttagccagcctgtaatgagaggagagaggcctgagtcacctagcatagggttgcagcaagccctggattcagagtgttaaacagaggcttgccctcttcaggacaacagttccaattccaaggagcctacctgaggtccctactctcactggggtccccaggatgaaaacgacaatgtgcctttttattattatttatttggtggtcctgtgttatttaagagatcaaatgtataaccacctagctcttttcacctgacttagtaataactcatactaactggtttggatgcctgggttgtgacttctactgaccgctagataaacgtgtgcctgtcccccaggtggtgggaataatttacaatctgtccaaccagaaaagaatgtgtgtgtttgagcagcattgacacatatctgctttgataagagacttcctgattctctaggtcggttcgtggttatcccattgtggaaattcatcttgaatcccattgtcctatagtcctagcaataagagaaatttcctcaagtttccatgtgcggttctcctagctgcagcaatactttgacatttaaagagaaatttagagaatattctcatcctctaaaaatgtttaaatatataccaaacagtggccccctgcattagttttctgttgccactgcaacctattacttggtagcttaaaaacaacacattagcttatagtcctggggatcagaattccaaaatggatgtccctgaatgaaaatcaaggtgtcagcagagctgtgctccttctgaaggctctagggagaagccggttccttgccatttcaagcttctagaggctggctgcattcccaggctccagtggctggtcaagcttttctcacatggcatcactgtgacactggccctcccacttccctctttgacttacaaagcccaccaggaagatccaggataatctctccatctaaagttccttcatcatcctggaagagccttttgccatgcaagacaacatagccacaggtggggattaggaccagaacatctttggggtgctgttattctgcctaccacaccttcctgccactgactcccacaggagaggctacaaaatgatctggcgcacagggatgttttgtttagcttgcggactctaacacttaaaaaaaaacccagatcagaagatctggccatgctggggctcacattctcacctagcaacaactggctggagctgggcaccagctctgcctttagaaggggtgtccacttcaccaggtcaccacagcccacactacgccctatcacttcccacaatgaggctgagtgtttgtttctactgatcaatgcccctgcaggttgcatttattgtaatgaaaaagaaagactgggattaatctctaatcaggtgagtagaccatgagaccaatgtgtgctcacattaccctttttcttttttttctttttctttttctttttttttttaatgtgagacaggatctcattctgttgcctaggctggagtgcagtggcgcaatctcggctcactgcaacctctgcctcctgggctcaagcaattctcccacctcagcctcccaaatagctgggatcactggcacaaaccaccatgcccagctaattttgtattttttgtagagacagggtttcaccatgttgcccaggctggtctcaacctcctgggctcaagcaatcctcctgcctcggcctcccaaagtgctgggattacagatgtgagccaccgcatccagccccacaccctcatttataccaattacctgcccagtaactgtggacttttgcttcctcacccctgctctgatctggaaggagagggattatgttatagcttgtcagcacagtcccaagttcaatatttctgcggcaaaaacttccttcaaaaaataaatgtacttcattgtattcaatgaattcaccttggaaatgcaccgcctcaacttgttcacatggcataaatgaaaggaattttatagtctcctaaatggcgtgtactgcaagacctcttgaacactttccagaggataggatatttaagtcatgcccttggcgttgcctatggcacctttcccttctgaaagtctggttcctgcccagtgacccttggccttgtgagccgagatgctgaccctgcataaagggccaaaggagggctgcggcttccttccctcactgaagagcccttatttgaattcactgtgtggagccctagccctccattctcgacattccccaacctcccagccccttccaagcaggactaggtgccctgcattccacccaaggtgggattggccttccttaggctggctacttgtcaccatcaccgacatcactgttgcctgcaaggacaccacgtggccattttccttcaactgagggctcaaaactcctggacaagttgctggctcctgagaccagtatttcctggagctgtgcctcagtgaaggggcccagcctgaggaaccctggctcttttctttaaagcccaggccccacttacgtaaaacatttcagggtcactggaaacagtgaagtgccatttgttgaagcctactgcatgccagcccactgctcatccacgtggtctgccatgcctacgaggaaggccagcgcatgcaggactggtctctaatgctgtggtcattgcacagaagggaaaggtctcaaggaagagtcaactggaacaagcacaagcccaccggacatggccttggtaaaggttagcagactggtgtgtgtggatctgcagtgcttcactggaaataatttattcattgcagatactttttaggtggcattttattcatttcctgtgctttaaataaacaaatgtaccaaaaaacaagtatcaagctgtttaagtgcttcggctacttgtcccctggttcagtagaggccccggtttcccagttgttgactgtgacaggctcagcatgggctcagcagatgctgtcttaatttgtggatgatacagaaagccaggctttgggatacaagttctttcctcttcatttgatgccgtgcactgtgtgaagcagatgtttttgtccggaaataaaaataatagtcttggagtctcgccaaaaaaaaaaa

SEQ ID NO: 13 - DNA, 1860 bp, Homo sapiens
acgtcagaaaaaaaaaaaaaaagtttgcagaatgtcccacaccgaaaaaaaaaaaaaatccgaaaccgagcgaaaaaaacctgcgagtgggcctggcggatgggattattaaagcttcgccggagccgcggctcgccctcccactccgccagcctccgggagaggagccgcacccggccggcccggccccagccccatggacctccgagcaggggactcgtgggggatgttagcgtgcctgtgcacggtgctctggcacctccctgcagtgccagctctcaatcgcacaggggacccagggcctggcccctccatccagaaaacctatgacctcacccgctacctggagcaccaactccgcagcttggctgggacctatctgaactacctgggcccccctttcaacgagccagacttcaaccctccccgcctgggggcagagactctgcccagggccactgttgacttggaggtgtggcgaagcctcaatgacaaactgcggctgacccagaactacgaggcctacagccaccttctgtgttacttgcgtggcctcaaccgtcaggctgccactgctgagctgcgccgcagcctggcccacttctgcaccagcctccagggcctgctgggcagcattgcgggcgtcatggcagctctgggctacccactgccccagccgctgcctgggactgaacccacttggactcctggccctgcccacagtgacttcctccagaagatggacgacttctggctgctgaaggagctgcagacctggctgtggcgctcggccaaggacttcaaccggctcaagaagaagatgcagcctccagcagctgcagtcaccctgcacctgggggctcatggcttctgacttctgaccttctcctcttcgctcccccttcaaaccctgctcccactttgtgagagccagccctgtatgccaacacctgttgagccaggagacagaagctgtgagcctctggccctttcctggaccggctgggcgtgtgatgcgatcagccctgtctcctccccacctcccaaaggtctaccgagctggggaggaggtacagtaggccctgtcctgtcctgtttctacaggaagtcatgctcgagggagtgtgaagtggttcaggttggtgcagaggcgctcatggcctcctgcttcttgcctaccacttggccagtgcccacccagcccctcaggtggcacatctggagggcaggggttgaggggccaccaccacacatgcctttctggggtgaagccctttggctgccccactctccttggatgggtgttgctcccttatccccaaatcactctatacatccaattcaggaaacaaacatggtggcaattctacacaaaaagagatgagattaacagtgcagggttggggtctgcattggaggtgccctataaaccagaagagaaaatactgaaagcacaggggcagggacagaccagaccagacccaggagtctccaaagcacagagtggcaaacaaaacccgagctgagcatcaggaccttgcctcgaattgtcttccagtattacggtgcctcttctctgccccctttcccagggtatctgtgggttgccaggctggggagggcaaccatagccacaccacaggatttcctgaaagtttacaatgcagtagcattttggggtgtagggtggcagctccccaaggccctgccccccagccccacccactcatgactctaagtgtgttgtattaatatttatttatttggagatgttatttattagatgatatttattgcagaatttctattcttgtattaacaaataaaatgcttgccccagaaaaaaaaaaaaaaaaaaaa

SEQ ID NO: 14 - DNA, 2106 bp, Homo sapiens
gcgcgatggcggcggctcctttaggcagctgaaaggggatttaggcccggaagatccgagtccatccgcggcggggagagggcaagcgggaccggtaggggccggagcagcggcggcggcgctcggactgtcccatccgccccgtattgaggcgctgggagcggcggggcgacaggaaagcgatggtgaaagcggggccgtgaggggggcggagccgggagccggacccgcagtagcggcagcagcggcgccgcctcccagagttcagacccaggaagcggccgggagggcaggagcgaatcgggccgccgccgccatggagctgagagtcgggaacaggtaccggctgggccggaagatcggcagcggctccttcggagacatctatctcggtacggacattgctgcaggagaagaggttgccatcaagcttgaatgtgtcaaaaccaaacaccctcagctccacattgagagcaaaatctacaagatgatgcagggaggagtgggcatccccaccatcagatggtgcggggcagagggggactacaacgtcatggtgatggagctgctggggccaagcctggaggacctcttcaacttctgctccaggaaattcagcctcaaaaccgtcctgctgcttgctgaccaaatgatcagtcgcatcgaatacattcattcaaagaacttcatccaccgggatgtgaagccagacaacttcctcatgggcctggggaagaagggcaacctggtgtacatcatcgacttcgggctggccaagaagtaccgggatgcacgcacccaccagcacatcccctatcgtgagaacaagaacctcacggggacggcgcggtacgcctccatcaacacgcaccttggaattgaacaatcccgaagagatgacttggagtctctgggctacgtgctaatgtacttcaacctgggctctctcccctggcaggggctgaaggctgccaccaagagacagaaatacgaaaggattagcgagaagaaaatgtccacccccatcgaagtgttgtgtaaaggctacccttccgaatttgccacatacctgaatttctgccgttccttgcgttttgacgacaagcctgactactcgtacctgcggcagcttttccggaatctgttccatcgccagggcttctcctatgactacgtgttcgactggaacatgctcaaatttggtgccagccgggccgccgatgacgccgagcgggagcgcagggaccgagaggagcggctgagacactcgcggaacccggctacccgcggcctcccttccacagcctccggccgcctgcgggggacgcaggaagtggctccccccacacccctcacccctacctcacacacggctaacacctccccccggcccgtctccggcatggagagagagcggaaagtgagtatgcggctgcaccgcggggcccccgtcaacatctcctcgtccgacctcacaggccgacaagatacctctcgcatgtccacctcacagaatagcattcctttcgaacaccacggcaagtagctgctcgtctcccatcggaaggcagcactggattcctggtcgggtggcttccagtggtcttcagtctgtcgtgcaccgatgagaactctccttattgctgtgaagggcagacaatgcatggctgatctactctgttaccaatggctttactagtgacacgtcccccggtctaggatcgaaatgttaacaccgggagctctccaggccactcacccagcgacgctcgtgggggaaacatactaaacggacagactccaagagctgccaccgctggggctgcactgcggccccccacgtgaactcggttgtaacggggctgggaagaaaagcagagagagaattgcagagaatcagactccttttccagggcctcagctccctccagtggtggccgccctgtactccctgacgattccactgtaactaccaatcttctacttggttaagacagttttgtatcattttgctaaaaattattggcttaaatctgtgtaaagaaaaaaaaaaaaaaaaaaaaaaaaaaaaaaaaaaaaaaaaaaaaaaaaaaaaaaaaaaaaaaa

SEQ ID NO: 15 - DNA, 1103 bp, Homo sapiens
cacagagcccgggccgcaggcacctcctcgccagctcttccgctcctctcacagccgccagacccgcctgctgagccccatggcccgcgctgctctctccgccgcccccagcaatccccggctcctgcgagtggcactgctgctcctgctcctggtagccgctggccggcgcgcagcaggagcgtccgtggccactgaactgcgctgccagtgcttgcagaccctgcagggaattcaccccaagaacatccaaagtgtgaacgtgaagtcccccggaccccactgcgcccaaaccgaagtcatagccacactcaagaatgggcggaaagcttgcctcaatcctgcatcccccatagttaagaaaatcatcgaaaagatgctgaacagtgacaaatccaactgaccagaagggaggaggaagctcactggtggctgttcctgaaggaggccctgcccttataggaacagaagaggaaagagagacacagctgcagaggccacctggattgtgcctaatgtgtttgagcatcgcttaggagaagtcttctatttatttatttattcattagttttgaagattctatgttaatattttaggtgtaaaataattaagggtatgattaactctacctgcacactgtcctattatattcattctttttgaaatgtcaaccccaagttagttcaatctggattcatatttaatttgaaggtagaatgttttcaaatgttctccagtcattatgttaatatttctgaggagcctgcaacatgccagccactgtgatagaggctggcggatccaagcaaatggccaatgagatcattgtgaaggcaggggaatgtatgtgcacatctgttttgtaactgtttagatgaatgtcagttgttatttattgaaatgatttcacagtgtgtggtcaacatttctcatgttgaaactttaagaactaaaatgttctaaatatcccttggacattttatgtctttcttgtaaggcatactgccttgtttaatggtagttttacagtgtttctggcttagaacaaaggggcttaattattgatgttttcatagagaatataaaaataaagcacttatag

SEQ ID NO: 16 - DNA, 1234 bp, Homo sapiens
gagctccgggaatttccctggcccgggactccgggctttccagccccaaccatgcataaaaggggttcgccgttctcggagagccacagagcccgggccacaggcagctccttgccagctctcctcctcgcacagccgctcgaaccgcctgctgagccccatggcccgcgccacgctctccgccgcccccagcaatccccggctcctgcgggtggcgctgctgctcctgctcctggtggccgccagccggcgcgcagcaggagcgcccctggccactgaactgcgctgccagtgcttgcagaccctgcagggaattcacctcaagaacatccaaagtgtgaaggtgaagtcccccggaccccactgcgcccaaaccgaagtcatagccacactcaagaatgggcagaaagcttgtctcaaccccgcatcgcccatggttaagaaaatcatcgaaaagatgctgaaaaatggcaaatccaactgaccagaaggaaggaggaagcttattggtggctgttcctgaaggaggccctgcccttacaggaacagaagaggaaagagagacacagctgcagaggccacctggattgcgcctaatgtgtttgagcatcacttaggagaagtcttctatttatttatttatttatttatttgtttgttttagaagattctatgttaatattttatgtgtaaaataaggttatgattgaatctacttgcacactctcccattatatttattgtttattttaggtcaaacccaagttagttcaatcctgattcatatttaatttgaagatagaaggtttgcagatattctctagtcatttgttaatatttcttcgtgatgacatatcacatgtcagccactgtgatagaggctgaggaatccaagaaaatggccagtgagatcaatgtgacggcagggaaatgtatgtgtgtctattttgtaactgtaaagatgaatgtcagttgttatttattgaaatgatttcacagtgtgtggtcaacatttctcatgttgaagctttaagaactaaaatgttctaaatatcccttggacattttatgtctttcttgtaaggcatactgccttgtttaatgttaattatgcagtgtttccctctgtgttagagcagagaggtttcgatatttattgatgttttcacaaagaacaggaaaataaaatatttaaaaatataaaaaaaaaaaaaaaaaaaaaaaaaaaaaaaaa

SEQ ID NO: 17 - DNA, 1166 bp, Homo sapiens
gctccgggaatttccctggcccggccgctccgggctttccagtctcaaccatgcataaaaagggttcgccgatcttggggagccacacagcccgggtcgcaggcacctccccgccagctctcccgcttctcgcacagcttcccgacgcgtctgctgagccccatggcccacgccacgctctccgccgcccccagcaatccccggctcctgcgggtggcgctgctgctcctgctcctggtggccgccagccggcgcgcagcaggagcgtccgtggtcactgaactgcgctgccagtgcttgcagacactgcagggaattcacctcaagaacatccaaagtgtgaatgtaaggtcccccggaccccactgcgcccaaaccgaagtcatagccacactcaagaatgggaagaaagcttgtctcaaccccgcatcccccatggttcagaaaatcatcgaaaagatactgaacaaggggagcaccaactgacaggagagaagtaagaagcttatcagcgtatcattgacacttcctgcagggtggtccctgcccttaccagagctgaaaatgaaaaagagaacagcagctttctagggacagctggaaaggacttaatgtgtttgactatttcttacgagggttctacttatttatgtatttatttttgaaagcttgtattttaatattttacatgctgttatttaaagatgtgagtgtgtttcatcaaacatagctcagtcctgattatttaattggaatatgatgggttttaaatgtgtcattaaactaatatttagtgggagaccataatgtgtcagccaccttgataaatgacagggtggggaactggagggtggggggattgaaatgcaagcaattagtggatcactgttagggtaagggaatgtatgtacacatctattttttatactttttttttaaaaaaagaatgtcagttgttatttattcaaattatctcacattatgtgttcaacatttttatgctgaagtttcccttagacattttatgtcttgcttgtagggcataatgccttgtttaatgtccattctgcagcgtttctctttcccttggaaaagagaatttatcattactgttacatttgtacaaatgacatgataataaaagttttatgaaaaaaaaaaaaaaa

SEQ ID NO: 18 - DNA, 2475 bp, Homo sapiens
gtgcagaaggcacgaggaagccacagtgctccggatcctccaatcttcgctcctccaatctccgctcctccacccagttcaggaacccgcgaccgctcgcagcgctctcttgaccactatgagcctcctgtccagccgcgcggcccgtgtccccggtccttcgagctccttgtgcgcgctgttggtgctgctgctgctgctgacgcagccagggcccatcgccagcgctggtcctgccgctgctgtgttgagagagctgcgttgcgtttgtttacagaccacgcaaggagttcatcccaaaatgatcagtaatctgcaagtgttcgccataggcccacagtgctccaaggtggaagtggtagcctccctgaagaacgggaaggaaatttgtcttgatccagaagccccttttctaaagaaagtcatccagaaaattttggacggtggaaacaaggaaaactgattaagagaaatgagcacgcatggaaaagtttcccagtcttcagcagagaagttttctggaggtctctgaacccagggaagacaagaaggaaagattttgttgttgtttgtttatttgtttttccagtagttagctttcttcctggattcctcactttgaagagtgtgaggaaaacctatgtttgccgcttaagctttcagctcagctaatgaagtgtttagcatagtacctctgctatttgctgttattttatctgctatgctattgaagttttggcaattgactatagtgtgagccaggaatcactggctgttaatctttcaaagtgtcttgaattgtaggtgactattatatttccaagaaatattccttaagatattaactgagaaggctgtggatttaatgtggaaatgatgtttcataagaattctgttgatggaaatacactgttatcttcacttttataagaaataggaaatattttaatgtttcttggggaatatgttagagaatttccttactcttgattgtgggatactatttaattatttcactttagaaagctgagtgtttcacaccttatctatgtagaatatatttccttattcagaatttctaaaagtttaagttctatgagggctaatatcttatcttcctataattttagacattctttatctttttagtatggcaaactgccatcatttacttttaaactttgattttatatgctatttattaagtattttattaggagtaccataattctggtagctaaatatatattttagatagatgaagaagctagaaaacaggcaaattcctgactgctagtttatatagaaatgtattcttttagtttttaaagtaaaggcaaacttaacaatgacttgtactctgaaagttttggaaacgtattcaaacaatttgaatataaatttatcatttagttataaaaatatatagcgacatcctcgaggccctagcatttctccttggataggggaccagagagagcttggaatgttaaaaacaaaacaaaacaaaaaaaaacaaggagaagttgtccaagggatgtcaattttttatccctctgtatgggttagattttccaaaatcataatttgaagaaggccagcatttatggtagaatatataattatatataaggtggccacgctggggcaagttccctccccactcacagctttggcccctttcacagagtagaacctgggttagaggattgcagaagacgagcggcagcggggagggcagggaagatgcctgtcgggtttttagcacagttcatttcactgggattttgaagcatttctgtctgaatgtaaagcctgttctagtcctggtgggacacactggggttgggggtgggggaagatgcggtaatgaaaccggttagtcagtgttgtcttaatatccttgataatgctgtaaagtttatttttacaaatatttctgtttaagctatttcacctttgtttggaaatccttcccttttaaagagaaaatgtgacacttgtgaaaaggcttgtaggaaagctcctccctttttttctttaaacctttaaatgacaaacctaggtaattaatggttgtgaatttctatttttgctttgtttttaatgaacatttgtctttcagaataggattctgtgataatatttaaatggcaaaaacaaaacataattttgtgcaattaacaaagctactgcaagaaaaataaaacatttcttggtaaaaacgtatgtatttatatattatatatttatatataatatatattatatatttagcattgctgagctttttagatgcctattgtgtatcttttaaaggttttgaccattttgttatgagtaattacatatatattacattcactatattaaaattgtacttttttactatgtgtctcattggttcatagtctttattttgtcctttgaataaacattaaaagatttctaaacttcaaaaaaaaaaaaaaaaaa

SEQ ID NO: 19 - DNA, 3974 bp, Homo sapiens
ggggctagggggtggggctgcagccgggacggggccttcggcagggcctgcgggggcgggacggagcggacccgagtgatacccgggagactagcttggccacaggagacaacgttgaggtacagacaggattattcaagatcaggttgtagccattttcaacaaggatcactgatcaaaattttctttttacaaagagatttacaagttaaacatgaagggaaaatactggaatcatttggattctgacaggataaagaatacaatatttcacatttacttgtaatggaacctttgtaagattcatcacttgtcattcacccagttgggaacatggatgttggtttttctcgtactactgttcagacactgtcaagaagccactgcaaaaacatcaaacaaaaaatttctcaatgggaaggaagggctaatggtatatctaatccagaaaagtggtgtccaaaggactttggagtgagatataactgtcaccaagagatccgtcttaagaaaaatcctatagctgagagaaagagcaaaaacttggatgtaaccagccgtgaaaatgtgggtctagatataaatgaaaataccaaaagccatgatcaaagtgagaatgaaaataagaaacatgaatatgacgatacacacttctttaaaaatgaatcagaatccaactgggtatgttctcgggtcaaagaaattgaaagctgtaaagaagatgtcttagatccagagacttcattacctccaggaaacttctatacctcacaaatactgtggaagaaaatagaagcacttcccccagataaactcttaaatttggctttagaacattgtgactcttcagaaaaagaactgaacttcagagttctggatagttcatacggaataaccaagagcttagaaaatatttactctgaacctgaggggcaagaatgtggaccttccataaatcctttgccaaaacctcgtaggacattcagatatttatccgaatctggtgttacgccgtataaagaaagaaactgtgacaaaaaatactgtgaaaataactcttgtgcacaatcttctttggcctcttctcaggaacctgaaccaaagaaatatggtggaaaaatcagaggaagatctaaaaggaaatcctttgaatttgaggatattcagcactttcgaaatcggaactcacagacgattcgtgaagaacttggaagaaattctgggtcagcactttattacacacagtctgaggacaatatctatgaagatatcatatatcccaccaaagaaaatccatatgaagatattccagtgcagcctttacctatgtggagatccccttcagcatggaagctaccacccgctaaaagtgcttttaaagcacccaagcttgtattgaaaatagatgacatatttgaatctaaaagagggaagaagaaggtaaagttacattcttacactggaaaggaattacctccgacaaaaggtgaaaccagtgggaacgaaagtgatgccgagtatctgccaaagaatcgccataaacgcttagcacaactgcaaccgtcttccaagaggaatcctcactaccagaccttggagcgggatcttattgaattacaggagcagcagctgtttgaactttttgtggtggtgtctctacagaagaaaccatcaggaataagctatattccccaggtcatacaacaattccctggcaaggatgatcatggctataagcagtccaaagacatggaagagagacttaaagttattccaaaattttgttttcctgattcaaaggactggatgccaacctcagaactcaagagtgaaacattctcctttgtcttgactggtgaagatggaagccggtggtttggttactgtaagaagctcttgccagtaggcaaaggaaagcgactccctgaggtatactgcatggttagtcgcctaggctgcttcaatcttttttcaaagattctggatgaagtagagaagagaagagaaatgtctccagcccttgtttacccattcatgcgaagtgtcatggaagctcctttcccagctcctggacgcaccatcacagttaagagttacctccctggggctggagatgagtccattgaactctgccgaccactagattcccgattggaacatgttgattttaaatgtctctttaagtgcctgagtgtgtgtcatctcatccgggtctgtgcctctctccttttggagcgtagggtaatctttgttgccaacagcctaagcaccctgtcaaaatgtggccatgctgtggtagctacactgtatccgttcacctggcagcatacctatatcccagtcctgccagcatctatgattgacatcgtgtgctcacctacaccattccttattggaatcctgtcttgctccttaccacagctccaggacctacccattgaagaggtgctgatagttgatctctgtgcagacaagttcttacaggaggtatctgatgaggatgaaattctaccaccaaaacttcaagctgccctgatgcagattttggaagaacgaaatgaaatcttgactcaggagcagaatttttcacaagatgtgacactcaactctctggtgtccgaagcatttgtcaggttttttgtggagttggtaggacattattctttgaacatgactgtcactgagcgtggggagcgtgttttccaaagggaaccattccgtaagtcccacacctcccgaagtgtacgccacttcctggatctcttcatggaaactcagatgtttgcaggattcatccaggaccgagagcttcggaaaagtggagttaaaggtttgtttgagatccgggccatccagtatttggaaacaattcctgagtcggagcccagtgggatgaatagaattttgcggagtcttggaagcaaaatgaaatttctgcaaaagaaatgaaatctctgattgtctccatcctgaatatacaacagaaagtgccaaagaaaatatttttctaagggtcaggatcccatgaagtattctacaaaattcttgaaattttaaaaggttaaagagcgagtcaggctgttagaggaggattctcctgttgctgctgtagtaatcactggagaattgttgggaatggtctggcaccatgccatctttactctgtctccattttttttttatagcagccttttctatgtgattcttgggctcattctctgttttgtgctttgtctgtgaaagtagttgtgtttcacaaggaaaagccttgttgttgttacatttaaaaaatagctcaaagatgagaataatgagagaaatgctgagtttaaggtagtagagagacatgatggaaatggagaacactagccttatacacataattctcatcactgaactatcatggcccctttaaacccatgggctgtttgacctgggctaaggaatagactcatcacatatctccattgttttgccttatattatatctaggggaatctcacttaggaggaagccctacttgtaatattataaggtactgttattaagtaccttataaaattagacatcttgcaactcctcctccaaattatgtggcatttgagtagtttgcttgtgcctcacatgtcaacattaaactttgtggaggctggatgcagtggctcacacctgtaatctccaccactttgggaggctaaggcaggagtttgagggtgggagtttgagactagcctgggcaacatagcaagatcccatctctacaaaaacattttaaaaataagtaaataaatttaaactttgtgaaattatagctaatatgaaaatgtcctttcaagggcatgggagccacctttattttttagtgtccaccatgtgccatgcactgtggtatatgtatgcatatcatctcaaccaatccttaaatcaaccttatgagatagatatttgcatctccattttactaataaactgag

SEQ ID NO: 20 - DNA, 2015 bp, Homo sapiens
tcgctgcgaaggacatttgggctgtgtgtgcgacgcgggtcggaggggcagtcgggggaaccgcgaagaagccgaggagcccggagccccgcgtgacgctcctctctcagtccaaaagcggcttttggttcggcgcagagagacccgggggtctagcttttcctcgaaaagcgccgccctgcccttggccccgagaacagacaaagagcaccgcagggccgatcacgctgggggcgctgaggccggccatggtcatggaagtgggcaccctggacgctggaggcctgcgggcgctgctgggggagcgagcggcgcaatgcctgctgctggactgccgctccttcttcgctttcaacgccggccacatcgccggctctgtcaacgtgcgcttcagcaccatcgtgcggcgccgggccaagggcgccatgggcctggagcacatcgtgcccaacgccgagctccgcggccgcctgctggccggcgcctaccacgccgtggtgttgctggacgagcgcagcgccgccctggacggcgccaagcgcgacggcaccctggccctggcggccggcgcgctctgccgcgaggcgcgcgccgcgcaagtcttcttcctcaaaggaggatacgaagcgttttcggcttcctgcccggagctgtgcagcaaacagtcgacccccatggggctcagccttcccctgagtactagcgtccctgacagcgcggaatctgggtgcagttcctgcagtaccccactctacgatcagggtggcccggtggaaatcctgccctttctgtacctgggcagtgcgtatcacgcttcccgcaaggacatgctggatgccttgggcataactgccttgatcaacgtctcagccaattgtcccaaccattttgagggtcactaccagtacaagagcatccctgtggaggacaaccacaaggcagacatcagctcctggttcaacgaggccattgacttcatagactccatcaagaatgctggaggaagggtgtttgtccactgccaggcaggcatttcccggtcagccaccatctgccttgcttaccttatgaggactaatcgagtcaagctggacgaggcctttgagtttgtgaagcagaggcgaagcatcatctctcccaacttcagcttcatgggccagctgctgcagtttgagtcccaggtgctggctccgcactgttcggcagaggctgggagccccgccatggctgtgctcgaccgaggcacctccaccaccaccgtgttcaacttccccgtctccatccctgtccactccacgaacagtgcgctgagctaccttcagagccccattacgacctctcccagctgctgaaaggccacgggaggtgaggctcttcacatcccattgggactccatgctccttgagaggagaaatgcaataactctgggaggggctcgagagggctggtccttatttatttaacttcacccgagttcctctgggtttctaagcagttatggtgatgacttagcgtcaagacatttgctgaactcagcacattcgggaccaatatatagtgggtacatcaagtccatctgacaaaatggggcagaagagaaaggactcagtgtgtgatccggtttctttttgctcgcccctgttttttgtagaatctcttcatgcttgacatacctaccagtattattcccgacgacacatatacatatgagaatataccttatttatttttgtgtaggtgtctgccttcacaaatgtcattgtctactcctagaagaaccaaatacctcaatttttgtttttgagtactgtactatcctgtaaatatatcttaagcaggtttgttttcagcactgatggaaaataccagtgttgggtttttttttagttgccaacagttgtatgtttgctgattatttatgacctgaaataatatatttcttcttctaagaagacattttgttacataaggatgacttttttatacaatggaataaattatggcatttctattg

SEQ ID NO: 21 - DNA, 2498 bp, Homo sapiens
gctgagcgccggaggagcgtaggcagggcagcgctggcgccagtggcgacaggagccgcgcgaccggcaaaaatacacgggaggccgtcgccgaaaagagtccgcggtcctctctcgtaaacacactctcctccaccggcgcctccccctccgctctgcgcgccgcccggctgggcgcccgaggccgctccgactgctatgtgaccgcgaggctgcgggaggaaggggacagggaagaagaggctctcccgcgggagcccttgaggaccaagtttgcggccacttctgcaggcgtcccttcttagctctcgcccgcccctttctgcagcctaggcggcccgggttctcttctcttcctcgcgcgcccagccgcctcggttcccggcgaccatggtgacgatggaggagctgcgggagatggactgcagtgtgctcaaaaggctgatgaaccgggacgagaatggcggcggcgcgggcggcagcggcagccacggcaccctggggctgccgagcggcggcaagtgcctgctgctggactgcagaccgttcctggcgcacagcgcgggctacatcctaggttcggtcaacgtgcgctgtaacaccatcgtgcggcggcgggctaagggctccgtgagcctggagcagatcctgcccgccgaggaggaggtacgcgcccgcttgcgctccggcctctactcggcggtcatcgtctacgacgagcgcagcccgcgcgccgagagcctccgcgaggacagcaccgtgtcgctggtggtgcaggcgctgcgccgcaacgccgagcgcaccgacatctgcctgctcaaaggcggctatgagaggttttcctccgagtacccagaattctgttctaaaaccaaggccctggcagccatcccacccccggttccccccagtgccacagagcccttggacctgggctgcagctcctgtgggaccccactacacgaccaggggggtcctgtggagatccttcccttcctctacctcggcagtgcctaccatgctgcccggagagacatgctggacgccctgggcatcacggctctgttgaatgtctcctcggactgcccaaaccactttgaaggacactatcagtacaagtgcatcccagtggaagataaccacaaggccgacatcagctcctggttcatggaagccatagagtacatcgatgccgtgaaggactgccgtgggcgcgtgctggtgcactgccaggcgggcatctcgcggtcggccaccatctgcctggcctacctgatgatgaagaaacgggtgaggctggaggaggccttcgagttcgttaagcagcgccgcagcatcatctcgcccaacttcagcttcatggggcagctgctgcagttcgagtcccaggtgctggccacgtcctgtgctgcggaggctgctagcccctcgggacccctgcgggagcggggcaagacccccgccacccccacctcgcagttcgtcttcagctttccggtctccgtgggcgtgcactcggcccccagcagcctgccctacctgcacagccccatcaccacctctcccagctgttagagccgccctgggggccccagaaccagagctggctcccagcaagggtaggacgggccgcatgcgggcagaaagttgggactgagcagctgggagcaggcgaccgagctccttccccatcatttctccttggccaacgacgaggccagccagaatggcaataaggactccgaatacataataaaagcaaacagaacactccaacttagagcaataacggctgccgcagcagccagggaagaccttggtttggtttatgtgtcagtttcacttttccgatagaaatttcttacctcatttttttaagcagtaaggcttgaagtgatgaaacccacagatcctagcaaatgtgcccaaccagctttactaaagggggaggaagggagggcaaagggatgagaagacaagtttcccagaagtgcctggttctgtgtacttgtccctttgttgtcgttgttgtagttaaaggaatttcattttttaaaagaaatcttcgaaggtgtggttttcatttctcagtcaccaacagatgaataattatgcttaataataaagtatttattaagactttcttcagagtatgaaagtacaaaaagtctagttacagtggatttagaatatatttatgttgatgtcaaacagctgagcaccgtagcatgcagatgtcaaggcagttaggaagtaaatggtgtcttgtagatatgtgcaaggtagcatgatgagcaacttgagtttgttgccactgagaagcaggcgggttgggtgggaggaggaagaaagggaagaattaggtttgaattgctttttaaaaaaaaaagaaaagaaaaagacagcatctcactatgttgccaaggctcatcttgagaagcaggcgggttgggtgggaggaggaagaaagggaagaattaggtttgaattgctttttt

SEQ ID NO: 22 - DNA, 2545 bp, Homo sapiens
actcattcacataaaacgctgcgcggccggcggaatccccggcttctagggcggcgagcggccgggctggctatcgagcgagcggggcgggaacgcggagttgcgccgccgctcgggcgccgggctccgtcgcggccgcagccccgcgggtcgccctcccgtgcctcgcccgcggacaccctggccgtggacaccctggccgtgggcacccgcggggcgcgcggcgcggggccgctggccggcggcggcggcggcatgaaggtcacgtcgctcgacgggcgccagctgcgcaagatgctccgcaaggaggcggcggcgcgctgcgtggtgctcgactgccggccctatctggccttcgctgcctcgaacgtgcgcggctcgctcaacgtcaacctcaactcggtggtgctgcggcgggcccggggcggcgcggtgtcggcgcgctacgtgctgcccgacgaggcggcgcgcgcgcggctcctgcaggagggcggcggcggcgtcgcggccgtggtggtgctggaccagggcagccgccactggcagaagctgcgagaggagagcgccgcgcgtgtcgtcctcacctcgctactcgcttgcctacccgccggcccgcgggtctacttcctcaaagggggatatgagactttctactcggaatatcctgagtgttgcgtggatgtaaaacccatttcacaagagaagattgagagtgagagagccctcatcagccagtgtggaaaaccagtggtaaatgtcagctacaggccagcttatgaccagggtggcccagttgaaatccttcccttcctctaccttggaagtgcctaccatgcatccaagtgcgagttcctcgccaacctgcacatcacagccctgctgaatgtctcccgacggacctccgaggcctgcgcgacccacctacactacaaatggatccctgtggaagacagccacacggctgacattagctcccactttcaagaagcaatagacttcattgactgtgtcagggaaaagggaggcaaggtcctggtccactgtgaggctgggatctcccgttcacccaccatctgcatggcttaccttatgaagaccaagcagttccgcctgaaggaggccttcgattacatcaagcagaggaggagcatggtctcgcccaactttggcttcatgggccagctcctgcagtacgaatctgagatcctgccctccacgcccaacccccagcctccctcctgccaaggggaggcagcaggctcttcactgataggccatttgcagacactgagccctgacatgcagggtgcctactgcacattccctgcctcggtgctggcaccggtgcctacccactcaacagtctcagagctcagcagaagccctgtggcaacggccacatcctgctaaaactgggatggaggaatcggcccagccccaagagcaactgtgatttttgtttttaagactcatggacatttcatacctgtgcaatactgaagacctcattctgtcatgctgccccagtgagatagtgagtggtcaccaggcttgcaaatgaacttcagacggacctcagggtaggttctcgggactgaaggaaggccaagccattacgggagcacagcatgtgctgactactgtacttccagacccctgccctcttgggactgcccagtccttgcacctcagagttcgccttttcatttcaagcataaggcaataaatacctgcagcaacgtgggagaaagaagttgctggaccaggagaaaaggcagttatgaagccaattcattttgaaggaagcacaatttccaccttattttttgaactttggcagtttcaatgtctgtctctgttgcttcggggcataagctgatcaccgtctagttgggaaagtaaccctacagggtttgtagggacatgatcagcatcctgatttgaaccctgaaatgttgtgtagacaccctcttgggtccaatgaggtagttggttgaagtagcaagatgttggcttttctggattttttttgccatgggttcttcactgaccttggactttggcatgattcttagtcatacttgaacttgtctcattccacctcttctcagagcaactcttcctttgggaaaagagttcttcagatcatagaccaaaaaagtcataccttcgaggtggtagcagtagattccaggaggagaagggtacttgctaggtatcctgggtcagtggcggtgcaaactggtttcctcagctgcctgtccttctgtgtgcttatgtctcttgtgacaattgttttcctccctgcccctggaggttgtcttcaagctgtggacttctgggatttgcagattttgcaacgtggtactactttttttttctttttgtctgttagttatttctccaggggaaaaggcaataattttctaagacccgtgtgaatgtgaagaaaagcagtatgttactggttgttgttgttgttcttgttttttatagtgtaaaataaaaatagtaaaaggagaaaagcaaaaaaaaaaaaaaaaaa

SEQ ID NO: 23 - DNA, 2404 bp, Homo sapiens
gagacgctcgctgtttgtatccattgaggagctgcctcgcgcagggggtgtgcgaggctgagtccaagagatagcaaatcgagtcttaaataatccggggagaaagacgcccgggtagatttgaggtgcagccttggagggagggattagaagccgctagactttttttcctcccctctcagtagcacggagtccgaattaattggatttcattcactggggaggaacaaaaactatctgggcagcttcattgagagagattcattgacactaagagccagcggctgcagctgggtgcagagagaacctccggctttacttctgtctcgtctgccccaaccgctagcctcggcttgggtaaggcgaggcggaattaaaccccgctccgagagcggcagcttcgcgcgcggtgcgctcggcctatgcctgccccgaggggcgtctggtaggcaccccgccctctcccgcagctcgacccccatgatagatacgctcagacccgtgcccttcgcgtcggaaatggcgatcagcaagacggtggcgtggctcaacgagcagctggagctgggcaacgagcggctgctgctgatggactgccggccgcaggagctatacgagtcgtcgcacatcgagtcggccatcaacgtggccatcccgggcatcatgctgcggcgcctgcagaagggtaacctgccggtgcgcgcgctcttcacgcgcggcgaggaccgggaccgcttcacccggcgctgtggcaccgacacagtggtgctctacgacgagagcagcagcgactggaacgagaatacgggcggcgagtcggtgctcgggctgctgctcaagaagctcaaggacgagggctgccgggcgttctacctggaagatgaagcccggggcaagaactgtggtgtcttggtacattgcttggctggcattagccgctcagtcactgtgactgtggcttaccttatgcagaagctcaatctgtcgatgaacgatgcctatgacattgtcaaaatgaaaaaatccaacatatcccctaacttcaacttcatgggtcagctgctggacttcgagaggacgctgggactcagcagcccatgtgacaacagggttccagcacagcagctgtattttaccaccccttccaaccagaatgtataccaggtggactctctgcaatctacgtgaaagaccccacacccctccttgctggaatgtgtctggcccttcagcagtttctcttggcagcatcagctgggctgctttctttgtgtgtggccccaggtgtcaaaatgacaccagctgtctgtactagacaaggttaccaagtgcggaattggttaatactaacagagagatttgctccattctctttggaataacaggacatgctgtatagatacaggcagtaggtttgctctgtacccatgtgtacagcctacccatgcagggactgggattcgaggacttccaggcgcatagggtagaaccaaatgatagggtaggagcatgtgttctttagggccttgtaaggctgtttccttttgcatctggaactgactatataattgtcttcaatgaagactaattcaattttgcatatagaggagccaaagagagatttcagctctgtatttgtggtatcagtttggaaaaaaaaatctgatactccatttgattattgtaaatatttgatcttgaatcacttgacagtgtttgtttgaattgtgtttgttttttcctttgatgggcttaaaagaaattatccaaagggagaaagagcagtatgccacttcttaaaacagaacaaaacaaaaaaagaaaattgtgctcttttctaatccaaagggtatatttgcagcatgcttgactttaccaattctgatgacatctttacggacactattatcactaagaccttgttatggcgaagtctttagtctttttcatgtattttcctcatgattttttctctttatgtagtttgactatgccttacctttgtaaatatttttgcttgtgttgtcgcaaaggggataatctgggaaagacaccaaatcatgggctcactttaaaaaaagaaagaataaaaaaaccttcagctgtgctaaacagtatattacctctgtataaaattcttcagggagtgtcacctcaaatgcaatactttgggttggtttctttcctttaaaaaaatttgtataaaactggaagtgtgtgtgtgtgagcatgggtacccatttgataagagaaatgcatttgattgtgaagaagggagagttaaattctccattatgttcgtggtgtaaagtttagagctggaatttattataagaatgtaaaaccttaaattattaataaataactattttggctattgaaaaaaaaaaaaaaaaaaaaaaaa

SEQ ID NO: 24 - DNA, 3346 bp, Homo sapiens
gagtagacagcacagcggcagcggagggagtctatgcgagctggacagcagtgggaggtttgtgaggctcgcactggccgcagaccctcgggctcgatcgcccgggagccaggactcggcgacgcgaggctgccgggctacccggccgaggcttcgggggcgcaaactaatgggactggctcgctcggcagcatctccccgctcttctaagtacactgagcagggcccgcgctgaagtagaagctgtccgggggcgcgtagcccggagtcccagtgtggcccggaggaacggagcccgtgccagggcggcccagtcgggagcccggggaccgagcttgtgctgtggggaaacccccacttcttccaagggacagcgatcccgggacggtcgaggcgtcggggcggtcaccgagacctctgcgggaagaccccgtcggggagagggcgcgcagccccgaagcgtctcgggaagtcgagcggaatcgggcgggatcacccgggggcgcagagcccccgtcgcgcctcgtgcggcagcggagagcccaggagaacgagccctcgggggccgaagcccatgcccgggttgggggcggctgcccagtgagtcctcctggccggccgggcggagaagagcgacaccgaagccggcgggaggggagcacttcaaggccggcggctgcggaggatgggcgcctgagcggctccgagcgcagcgcggcagaggaaggcgaggcgagctttggtgaggaggcgccaagggatcccgaagtgcagtctgcccccgggaagatggctcggcctgggcagcgttggctcggcaagtggcttgtggcgatggtcgtgtgggcgctgtgccggctcgccacaccgctggccaagaacctggagcccgtatcctggagctccctcaaccccaagttcctgagtgggaagggcttggtgatctatccgaaaattggagacaagctggacatcatctgcccccgagcagaagcagggcggccctatgagtactacaagctgtacctggtgcggcctgagcaggcagctgcctgtagcacagttctcgaccccaacgtgttggtcacctgcaataggccagagcaggaaatacgctttaccatcaagttccaggagttcagccccaactacatgggcctggagttcaagaagcaccatgattactacattacctcaacatccaatggaagcctggaggggctggaaaaccgggagggcggtgtgtgccgcacacgcaccatgaagatcatcatgaaggttgggcaagatcccaatgctgtgacgcctgagcagctgactaccagcaggcccagcaaggaggcagacaacactgtcaagatggccacacaggcccctggtagtcggggctccctgggtgactctgatggcaagcatgagactgtgaaccaggaagagaagagtggcccaggtgcaagtgggggcagcagcggggaccctgatggcttcttcaactccaaggtggcattgttcgcggctgtcggtgccggttgcgtcatcttcctgctcatcatcatcttcctgacggtcctactactgaagctacgcaagcggcaccgcaagcacacacagcagcgggcggctgccctctcgctcagtaccctggccagtcccaaggggggcagtggcacagcgggcaccgagcccagcgacatcatcattcccttacggactacagagaacaactactgcccccactatgagaaggtgagtggggactacgggcaccctgtctacatcgtccaagagatgccgccccagagcccggcgaacatctactacaaggtctgagtgcccggcacggcctcaggcccccgagggacagtcggcctggaccggacctctcctttcgcccccacaccccctccccttgccagctgtgcccacctttgtatttagttttgtagtttcttggcttttataatccccctttttccctgccccctgggcttcggaggggggtgcttgtgcccctaacccccatgctcttgtgccttccccctctggccaggcctctgggctccgtgggggcgccccttcttggaaggcagggctggacactgatggacagcaggcagggagacagtcccctggccctgcccctccctcgccccccttgccaccttcccaggactgcttgtccgctatcatcactgtttttaatgcttttgtgttcattttttagctgtcaactcattttcatctgttttttgaagaaaaatggaaaaatgtaaaaggcagcccctccccaggctttgtgagcctggcccaagccagtacaagagggcctggggcacgatgtggtcagccaggaagcataggatgccatttcttttatagattccttggtatttctggtggggtaaggggcaggccagggctgttcacgcccatgagggaagaggaaagtgccactgggcaaggtgtcccaccctcccctcctgaccctcctacgaggcttatcctggcaatggggtagtcactgccacccttccacacacacacacacacacacacacacaaaaaaaaatcccttccttgtgggattcttgggcatctcctgcctccctcactctcacggtaattaatgtcttaattggctgttgcctggggaacaggagagctgctgcaggcagatgacctcatggggggtggagggaggtgaggtgcccaggtggctatttgccctgcagagctgggagtttcacccccaccccccaccctgttctctccttacctttggcatcctttggcctggtggggaaacagaggcccagggtggagacctaagcgggtataagaccaggtggcctgctccttttctgggccctagcacaggtgggtaacccccacccaacccagctcctgctgctgtcccagtcttgggctggggcctggaaagaggaagaggctgcctggggctgggccagcccgctgtgcactttgaccccagttccttgccagcacggctgctaacagactgccacttgagtgcgccttgcaggcactcccagagcagccatggaaggagctggccctcacaccatccacctccacactgcctcctggccagctgcccaccccagtgccaggtgggagagggagcagaacagccagccccttccaggtggcagtcggaagggtttttgtttttgtttctgttgccatttgtgtaaatactagtctttttggaaaaaaaataatgtaaagatgttttgtataaactctgaattattttcttgttgcttttttcttagaaaaaaatgagaactaaaaaaaaaaaattaaccacatggaaaaaaaaaaa

SEQ ID NO: 25 - DNA, 3136 bp, Homo sapiens
gcgcagaacttggggagccgccgccgccatccgccgccgcagccagcttccgccgccgcaggaccggcccctgccccagcctccgcagccgcggcgcgtccacgcccgcccgcgcccagggcgagtcggggtcgccgcctgcacgcttctcagtgttccccgcgccccgcatgtaacccggccaggcccccgcaactgtgtcccctgcagctccagccccgggctgcacccccccgccccgacaccagctctccagcctgctcgtccaggatggccgcggccaaggccgagatgcagctgatgtccccgctgcagatctctgacccgttcggatcctttcctcactcgcccaccatggacaactaccctaagctggaggagatgatgctgctgagcaacggggctccccagttcctcggcgccgccggggccccagagggcagcggcagcaacagcagcagcagcagcagcgggggcggtggaggcggcgggggcggcagcaacagcagcagcagcagcagcaccttcaaccctcaggcggacacgggcgagcagccctacgagcacctgaccgcagagtcttttcctgacatctctctgaacaacgagaaggtgctggtggagaccagttaccccagccaaaccactcgactgccccccatcacctatactggccgcttttccctggagcctgcacccaacagtggcaacaccttgtggcccgagcccctcttcagcttggtcagtggcctagtgagcatgaccaacccaccggcctcctcgtcctcagcaccatctccagcggcctcctccgcctccgcctcccagagcccacccctgagctgcgcagtgccatccaacgacagcagtcccatttactcagcggcacccaccttccccacgccgaacactgacattttccctgagccacaaagccaggccttcccgggctcggcagggacagcgctccagtacccgcctcctgcctaccctgccgccaagggtggcttccaggttcccatgatccccgactacctgtttccacagcagcagggggatctgggcctgggcaccccagaccagaagcccttccagggcctggagagccgcacccagcagccttcgctaacccctctgtctactattaaggcctttgccactcagtcgggctcccaggacctgaaggccctcaataccagctaccagtcccagctcatcaaacccagccgcatgcgcaagtaccccaaccggcccagcaagacgcccccccacgaacgcccttacgcttgcccagtggagtcctgtgatcgccgcttctcccgctccgacgagctcacccgccacatccgcatccacacaggccagaagcccttccagtgccgcatctgcatgcgcaacttcagccgcagcgaccacctcaccacccacatccgcacccacacaggcgaaaagcccttcgcctgcgacatctgtggaagaaagtttgccaggagcgatgaacgcaagaggcataccaagatccacttgcggcagaaggacaagaaagcagacaaaagtgttgtggcctcttcggccacctcctctctctcttcctacccgtccccggttgctacctcttacccgtccccggttactacctcttatccatccccggccaccacctcatacccatcccctgtgcccacctccttctcctctcccggctcctcgacctacccatcccctgtgcacagtggcttcccctccccgtcggtggccaccacgtactcctctgttccccctgctttcccggcccaggtcagcagcttcccttcctcagctgtcaccaactccttcagcgcctccacagggctttcggacatgacagcaaccttttctcccaggacaattgaaatttgctaaagggaaaggggaaagaaagggaaaagggagaaaaagaaacacaagagacttaaaggacaggaggaggagatggccataggagaggagggttcctcttaggtcagatggaggttctcagagccaagtcctccctctctactggagtggaaggtctattggccaacaatcctttctgcccacttccccttccccaattactattccctttgacttcagctgcctgaaacagccatgtccaagttcttcacctctatccaaagaacttgatttgcatggattttggataaatcatttcagtatcatctccatcatatgcctgaccccttgctcccttcaatgctagaaaatcgagttggcaaaatggggtttgggcccctcagagccctgccctgcacccttgtacagtgtctgtgccatggatttcgtttttcttggggtactcttgatgtgaagataatttgcatattctattgtattatttggagttaggtcctcacttgggggaaaaaaaaaaaagaaaagccaagcaaaccaatggtgatcctctattttgtgatgatgctgtgacaataagtttgaacctttttttttgaaacagcagtcccagtattctcagagcatgtgtcagagtgttgttccgttaacctttttgtaaatactgcttgaccgtactctcacatgtggcaaaatatggtttggtttttctttttttttttttttgaaagtgttttttcttcgtccttttggtttaaaaagtttcacgtcttggtgccttttgtgtgatgcgccttgctgatggcttgacatgtgcaattgtgagggacatgctcacctctagccttaaggggggcagggagtgatgatttgggggaggctttgggagcaaaataaggaagagggctgagctgagcttcggttctccagaatgtaagaaaacaaaatctaaaacaaaatctgaactctcaaaagtctatttttttaactgaaaatgtaaatttataaatatattcaggagttggaatgttgtagttacctactgagtaggcggcgatttttgtatgttatgaacatgcagttcattattttgtggttctattttactttgtacttgtgtttgcttaaacaaagtgactgtttggcttataaacacattgaatgcgctttattgcccatgggatatgtggtgtatatccttccaaaaaattaaaacgaaaataaagtagctgcgattggg

SEQ ID NO: 26 - DNA, 3482 bp, Homo sapiens
ccctaccgcccccaattccgccctgcccccgccgcggcggcgctagccgccactgagggaccgaccctataaaggccgctccgcgaggggtgcgcagcattcggcagagggcgcttcgacgggctgggctgtgcgcctgcgcagtgtgggtcgctcccgattccctgccccggccggccccgcctcggctccgcaccctcgccccgctctcagccgccgctctgccccgcagcagccagccccgtgtccggcagtatgttcagctgggtcagcaaggatgcccgccgcaagaaggagccggagctcttccagacggtggctgaggggctgcggcagctgtacgcgcagaagctgctacccctggaggagcactaccgcttccacgagttccactcgcccgcgctggaggacgctgacttcgacaacaagcctatggtgctcctcgtggggcagtacagcacgggcaagaccaccttcatccgacacctgatcgagcaggacttcccggggatgcgcatcgggcccgagcccaccaccgactccttcatcgccgtcatgcacggccccactgagggcgtggtgccgggcaacgcgctcgtggtggacccgcggcgccccttccgcaagctcaacgcgtttggcaacgctttcctcaacaggttcatgtgtgcccagctgcccaaccccgtcctggacagcatcagcatcatcgacacccccgggatcctgtctggagagaagcagcggatcagcagaggctatgactttgcagccgtcctggagtggttcgcggagcgtgtggaccgcatcatcctgctcttcgacgcccacaagctggacatctccgatgagttctcggaagtgatcaaggctctgaagaaccatgaggacaagatccgcgtggtgctgaacaaggcagaccagatcgagacgcagcagctgatgcgggtgtacggggccctcatgtggtccctgggcaagatcatcaacacccccgaggtggtcagggtctacatcggctccttctggtcccacccgctcctcatccccgacaaccgcaagctctttgaggccgaggagcaggacctcttcaaggacatccagtcactgccccgaaacgccgccctcaggaagctcaatgacctgatcaagcgggcacggctggccaaggttcacgcctacatcatcagctccctcaagaaagagatgcccaatgtctttggtaaagagagcaaaaagaaagagctggtgaacaacctgggagagatctaccagaagattgagcgcgagcaccagatctcccctggggacttcccgagcctccgcaagatgcaggaactcctgcagacccaggacttcagcaagttccaggcgctgaagcccaagctgctggacacggtggatgacatgctggccaacgacatcgcgcggctgatggtgatggtgcggcaggaggagtccctgatgccttcccaggtggtcaagggcggcgcctttgacggcaccatgaacgggccgttcgggcacggctacggcgagggggccggcgagggcatcgacgacgtggagtgggtggtgggcaaggacaagcccacctacgacgagatcttctacacgctgtcccctgtcaacggcaagatcacgggcgccaacgccaagaaggagatggtgaagtccaagctccccaacaccgtgctagggaagatctggaagctggccgacgtggacaaggacgggctgctggacgacgaggagttcgcgctggccaaccacctcatcaaggtcaagctggagggccacgagctgcccgccgacctgcccccgcacctggtgccgccctccaagcgcagacatgagtgatggcgcccggccccgcacctgccatttgcacgcccggccgggaggcagagacggggggaggggaagcctcaccatttctcaaggtccataaagactgagcggatgtttcctcgcctctcgaaaaggaaaaccaccatctttcttttaaggctgttcctgggcctggcgggggaggcaggggtgagaggatggaattgtgtgcacaagaactgtggctattttaatatataacgttagaggctgcgttctttgtcgccgcctcccctgtgtgccagccctgtgtgcacggcctctgccccccggcctttgctgtggctggagctggacagtgcagcgactgcgaccgtgggggagccaggtcgcccttttggcagctgctaggctgaggctgcatggacaggaacaccaggcaccctccgtgtgcttctgagctgaggttgcttcacgggaccgtggcttccttcctcacctggctctgcctcccccgtgctctcgggcgaagtgggttcttgtgccttcccctcccgggcccaggctccccgtgcgcgggccctgccctttcctcccgcgccccaccggctccgacgcgcaaccccgctcagcagtcacagaagcagggcccagccaccttggtctttttttgggagttcaggggagtaggagaatgtcttccagaaaaatacataagctagtttctgttctgtaaagtgatatctttcatacttgaccaaagttcccaataacttcccaaccactgttcaaaagctgtgatttttgtctccccttcccaccctccagccaaggagcagccctgcccagggggcattaggtgtgggtacccggggagcaccccgttcctggaccccagtgttgcatttcctggctgaggaagggtggtcatcccagctcctgccctaccctctcacttaactggagctttgggacgcaccctccacagtgggaggtggtggtgggtggcggtggcggggcctcacgacagcttggtgctggtaagaggaagcccgtggttctggctaggctctcatgtccagacagcggggaccaggggaaaacccagccccttctgtaatcccccttcatttcctaccttccttcctcctctgtttagcaaaggagggcagctcacttggatgtccttacaacgcccctggcccccaggttgagcaataagaaaccagaaccttgcggcccagtggcccgggccagttcaggccgcctccccctcctctgcctggggccattgagcccagcctccagggcccgggcgcgtttgcaggccagtggccactgtccgggctgtgatggcaccaaggcaggtggagcaccaggtaccacacagctgggcttcccaccaggctttcccgcgggggtctcagggagcttctccccagcgctgctcggagtctgcaggaactggccttgttctccttagcccgtcactccatacagtattaggtgaggatggatgcgggcgctgtccttgccgggaagtcactgttgaagttgcagtggcttgttcacacctgtgggaagagaagtgaagactttctccttgcattaaaaagtctgaactgtgaaaaaaaaaaaaaaaaaaaaaaaaa

SEQ ID NO: 27 - DNA, 2180 bp, Homo sapiens
gggcggaaaagcctgtttacacagactgcacaccgcctggggaataatgcagtaaaggaagtgagccggctcggcctgactgctccaacttcctgctctcacacacaccagaggggaaaaaaaaagaggagcgagagaaagaaaaaaagggggaaaaatcaggatctcattacaagagccacagaccgtctgcagacgcctgtcagcatggaaagtcgggggctttcgcccgggtcctcctagaaattccccccgaagaagactcccccacatctgggtatggagagtgcaatcacgctgtggcagttcctgttgcagttgctgctggatcagaaacatgagcatttgatctgctggacctcgaacgatggtgaattcaagctcctcaaagcagaagaagtggccaagctgtggggactccgaaaaaacaaaacaaatatgaactatgataagctgagcagagccctgcgatactattatgacaagaacatcatcaagaaggtgatcgggcagaagtttgtgtacaagtttgtctctttcccggagatcctgaagatggatcctcacgcggtggagatcagccgggagagccttctgctgcaggacagcgactgcaaggcgtctccggagggccgcgaggcccacaaacacggcctggccgccctcagaagcacgagccgcaacgaatacatccactcaggcctgtactcgtccttcaccattaattccctgcagaacccaccagacgccttcaaggccatcaagacggagaagctggaggagccgcccgaagacagcccccccgtggaagaagtcaggactgtgatcaggtttgtgaccaataaaaccgacaagcacgtcaccaggccggtggtgtccctgccttccacgtcagaggctgcggcggcgtccgccttcctggcctcgtccgtctcggccaagatctcctctttaatgttgccaaacgctgccagtatttcatccgcctcacccttctcatctcggtccccgtccctgtcccccaactcacccctcccttctgaacacagaagcctcttcctggaggccgcctgccatgactccgattccctggagcccttgaacctgtcatcgggctccaagaccaagtctccatctcttcccccaaaggccaaaaaacccaaaggcttggaaatctcagcgcccccgctggtgctctccggcaccgacatcggctccatcgccctcaacagcccagccctcccctcgggatccctcaccccagccttcttcaccgcacagacaccaaatggattgcttctgactccgagtccactgctctccagcatacatttctggagcagccttagtccagttgctccgctgagtcctgccaggctgcaagggccaagcacgctgttccagttccccacactgcttaatggccacatgccagtgccaatccccagtctggacagagctgcttctccagtactgctttcttcaaactctcagaaatcctgatgacgtctggccacaattaaggactcattaactgatgaaacaaatttgtccccacgggctagtttacctgtgtcgtgagaaggacattgtgaaactcttgttaatttggtttgcacttttcataacatggatagtctagatttatgttagcattttaaaaactgtttttgatatattcaagtatatatgaaaatctgtttggcattaagtgaattttaatgtttttgtttttatatccttttagctcttaagtgttgaacactgttgacagtgaagaacttttcttaatggttttcagtataactaataaggatgtgaagcttttttctctttagttctgagtatgctaaactgtgtgcttatatagactataaccagttgtgccttcctttgcatttaatgtaaatgaatgatttatatattttttagtattaagaggaaatgtttgaaagatgaaaattagtatcaaacagctctctagtagaatttcattatttttcaccagtgggcaatatgaaagcatatatcacgttttgttttactttcaattgtataagaattgccttagaacctcttttgaactgaaattcagtaaatgtccaagtaatgtttttataataaactaagccatatttagacaataaacatcgaaaaaaaaaaaaaaaaaaaaaaaaaaa

SEQ ID NO: 28 - DNA, 4628 bp, Homo sapiens
tcacttgcctgatatttccagtgtcagagggacacagccaacgtggggtcccttctaggctgacagccgctctccagccactgccgcgagcccgtctgctcccgccctgcccgtgcactctccgcagccgccctccgccaagccccagcgcccgctcccatcgccgatgaccgcggggaggaggatggagatgctctgtgccggcagggtccctgcgctgctgctctgcctgggtttccatcttctacaggcagtcctcagtacaactgtgattccatcatgtatcccaggagagtccagtgataactgcacagctttagttcagacagaagacaatccacgtgtggctcaagtgtcaataacaaagtgtagctctgacatgaatggctattgtttgcatggacagtgcatctatctggtggacatgagtcaaaactactgcaggtgtgaagtgggttatactggtgtccgatgtgaacacttctttttaaccgtccaccaacctttaagcaaagaatatgtggctttgaccgtgattcttattattttgtttcttatcacagtcgtcggttccacatattatttctgcagatggtacagaaatcgaaaaagtaaagaaccaaagaaggaatatgagagagttacctcaggggatccagagttgccgcaagtctgaatggcgccatcaaacttatgggcagggataacagtgtgcctggttaatattaatattcccattttattaataatatttatgttgggtcaagtgttaggtcaataacactgtattttaatgtacttgaaaaatgtttttatttttgttttatttttgacagactatttgctaatgtataatgtgcagaaaatatttaatatcaaaagaaaattgatatttttatacaagtaatttcctgagctaaatgcttcattgaaagcttcaaagtttatatgcctggtgcacagtgcttagaagtaagcaattcccaggtcatagctcaagaattgttagcaaatgacagatttctgtaagcctatatatatagtcaaatcgatttagtaagtatgttttttatgttcctcaaatcagtgataattggtttgactgtaccatggtttgatatgtagttggcaccatggtatcatatattaaaacaataatgcaattagaatttgggagaagcaaatataggtcctgtgttaaacactacacatttgaaacaagctaaccctggggagtctatggtctcttcactcaggtctcagctataattctgttatatgaggggcagtggacagttccctatgccaactcacgactcctacaggtactagtcactcatctaccagattctgcctatgtaaaatgaattgaaaaacaattttctgtaatcttttatttaagtagtgggcatttcatagcttcacaatgttccttttttgtatattacaacatttatgtgaggtaattattgctcaacagacaattagaaaaaagtccacacttgaagcctaaatttgtgctttttaagaatatttttagactatttctttttataggggctttgctgaattctaacattaaatcacagcccaaaatttgatggactaattattattttaaaatatatgaagacaataattctacatgttgtcttaagatggaaatacagttatttcatcttttattcaaggaagttttaactttaatacagctcagtaaatggcttcttctagaatgtaaagttatgtatttaaagttgtatcttgacacaggaaatgggaaaaaacttaaaaattaatatggtgtatttttccaaatgaaaaatctcaattgaaagcttttaaaatgtagaaacttaaacacaccttcctgtggaggctgagatgaaaactagggctcattttcctgacatttgtttattttttggaagagacaaagatttcttctgcactctgagcccataggtctcagagagttaataggagtatttttgggctattgcataaggagccactgctgccaccacttttggattttatgggaggctccttcatcgaatgctaaacctttgagtagagtctccctggatcacataccaggtcagggaggatctgttcttcctctacgtttatcctggcatgtgctagggtaaacgaaggcataataagccatggctgacctctggagcaccaggtgccaggacttgtctccatgtgtatccatgcattatataccctggtgcaatcacacgactgtcatctaaagtcctggccctggcccttactattaggaaaataaacagacaaaaacaagtaaatatatatggtcatatacatattgtatatatattcatatacaaacatgtatgtatacatgaccttaatggatcatagaattgcagtcatttggtgctctgctaaccatttatataaaacttaaaaacaagagaaaagaaaaatcaattagatctaaacagttatttctgtttcctatttaatacagctgaagtcaaaatatgtaagaacacattttaaatactctacttacagttggccctctgtggttagttccacatctgtggattcaaccaaccaaggacggaaaatgcttaaaaaataatacaacaacaacaaaaaatacattataacaactatttacttttttttttttctttttgagatggagtctcgctctgttgcccaggttggagtgcagtggcacgatctcggctcactgcaacctcacctcccgggttcaagagatcctcctgcctcagcctcctgagcagctgggactacaggcgcatgccaccatgcccagctaatttttgtatttttagtagaggcggggtttcaccatgttggccaggatggtctcaatctcctaaccttgagatccaccctccacagcctcccaaactgctgggattacaggtgtgagccaccgcacgtagcatttacattaggtattacaagtaatgtaaagatgatttaagtatacaggaggatgtgaataggttatatgcaagcactatgcccttttatataagtgacttgaacatctgtgcccgattttagtatgtgcaggggggcgatctgggaatcagtcccctgtggataccaaggtacaactgtatttattaacgcttactagatgtgaggagagtctgaatattttcagtgatcttggctgtttcaaaaaaatctattgacttttcaataaatcagctgcaatccatttatttcatttacaaaagatttattgtaagcatctcaatcttggtttgtcagtttatcttaagcatgtcaattcataaaaacaagtcatttttgtatttttcatctttaagaatgcttaaaaaagctaatccctaaaatagttagatctttgtaaatgcatattaaataataaagtatgacccacattactttttatgggtgaaaataagacaaaaataatagttttagtgaggatggtgctgagtaaacataaaaactgatttgctctcagctgatgtgtcctgtacacagtgggaagattttagttcacacttagtctaactcccccattttacagatttctcactatatatatttctagaaggggctatgcatattcaatgtattgagaaccaaagcaaccacaaatgcataaatgcataatttatggtcttcaaccaaggccacataataacccagttaacttactctttaaccaggaatattaagttctataactagtactcaaggtttaaccttaaaattaagatttccttaaccttaaccttaaaattgatattatattaaacatacataatacaatgtaactccactgttctcctgaatattttttgctctaatctctctgccgaaagtcaaagtgatgggagaattggtatactggtatgactacgtcttaagtcagatttttatttatgagtctttgagactaaattcaatcaccaccaggtatcaaatcaacttttatgcagcaaatatatgattctagtgtctgacttttgttaaattcagtaatgcagtttttaaaaacctgtatctgacccactttgtaatttttgctccaatatccattctgtagacttttgaaaaaaaagtttttaatttgatgcccaatatattctgaccgttaaaaaattcttgttcatatgggagaagggggagtaatgacttgtacaaacagtatttctggtgtatattttaatgtttttaaaaagagtaatttcatttaaatatctgttattcaaatttgatgatgttaaatgtaatataatgtattttctttttattttgcactctgtaattgcactttttaagtttgaagagccattttggtaaacggtttttattaaagatgctatggaacataaagttgtattgcatgcaatttgaagtaacttatttgactatgaatgttatcggattactgaattgtatcaatttgtttgtgttcaatatcagctttgataattgtgtaccttaagatattgaaggagaaaatagataatttacaagatattattaatttttatttatttttcttgggaattgaaaaaaattgaaataaataaaaatgcattgaacatcttgcattcaaaatcttcactgac

SEQ ID NO: 29 - DNA, 2084 bp, Homo sapiens
aaccgcatctgcagcgagcaactgagaagccaagactgagccggcggccgcggcgcagcgaacgagcagtgaccgtgctcctacccagctctgcttcacagcgcccacctgtctccgcccctcggcccctcgcccggctttgcctaaccgccacgatgatgttctcgggcttcaacgcagactacgaggcgtcatcctcccgctgcagcagcgcgtccccggccggggatagcctctcttactaccactcacccgcagactccttctccagcatgggctcgcctgtcaacgcgcaggacttctgcacggacctggccgtctccagtgccaacttcattcccacggtcactgccatctcgaccagtccggacctgcagtggctggtgcagcccgccctcgtctcctctgtggccccatcgcagaccagagcccctcaccctttcggagtccccgccccctccgctggggcttactccagggctggcgttgtgaagaccatgacaggaggccgagcgcagagcattggcaggaggggcaaggtggaacagttatctccagaagaagaagagaaaaggagaatccgaagggaaaggaataagatggctgcagccaaatgccgcaaccggaggagggagctgactgatacactccaagcggagacagaccaactagaagatgagaagtctgctttgcagaccgagattgccaacctgctgaaggagaaggaaaaactagagttcatcctggcagctcaccgacctgcctgcaagatccctgatgacctgggcttcccagaagagatgtctgtggcttcccttgatctgactgggggcctgccagaggttgccaccccggagtctgaggaggccttcaccctgcctctcctcaatgaccctgagcccaagccctcagtggaacctgtcaagagcatcagcagcatggagctgaagaccgagccctttgatgacttcctgttcccagcatcatccaggcccagtggctctgagacagcccgctccgtgccagacatggacctatctgggtccttctatgcagcagactgggagcctctgcacagtggctccctggggatggggcccatggccacagagctggagcccctgtgcactccggtggtcacctgtactcccagctgcactgcttacacgtcttccttcgtcttcacctaccccgaggctgactccttccccagctgtgcagctgcccaccgcaagggcagcagcagcaatgagccttcctctgactcgctcagctcacccacgctgctggccctgtgagggggcagggaaggggaggcagccggcacccacaagtgccactgcccgagctggtgcattacagagaggagaaacacatcttccctagagggttcctgtagacctagggaggaccttatctgtgcgtgaaacacaccaggctgtgggcctcaaggacttgaaagcatccatgtgtggactcaagtccttacctcttccggagatgtagcaaaacgcatggagtgtgtattgttcccagtgacacttcagagagctggtagttagtagcatgttgagccaggcctgggtctgtgtctcttttctctttctccttagtcttctcatagcattaactaatctattgggttcattattggaattaacctggtgctggatattttcaaattgtatctagtgcagctgattttaacaataactactgtgttcctggcaatagtgtgttctgattagaaatgaccaatattatactaagaaaagatacgactttattttctggtagatagaaataaatagctatatccatgtactgtagtttttcttcaacatcaatgttcattgtaatgttactgatcatgcattgttgaggtggtctgaatgttctgacattaacagttttccatgaaaacgttttattgtgtttttaatttatttattaagatggattctcagatatttatatttttattttatttttttctaccttgaggtcttttgacatgtggaaagtgaatttgaatgaaaaatttaagcattgtttgcttattgttccaagacattgtcaataaa

SEQ ID NO: 30 - DNA, 2338 bp, Homo sapiens
ctcaacgtcgaaccgaaggcgacacccacccaactcctccctctccgccccatagtccacccaacacttgcagcccctccagagaaaaagcccagcggaagaggactccggaaaagtgactatctcggaagaccagggtagagctcccgggagaaaaaggcgaagatccccggccccggatcgccatccccttccctggcaccagcttctctaggctgcgcgaaggaagagggtacgacgccggggagggactgggtgcgcgggcatgaagttggaggtgttcgtccctcgcgcggcccacggggacaagcagggcagtgacctggagggcgcgggcggcagcgacgcgccgtccccgctgtcggcggcgggagacgactccctgggctcagatggggactgcgcggccaacagcccggccgcgggcggcggcgccagagatacgcagggcgacggcgaacagagtgcgggaggcgggccgggcgcggaggaggcgatcccggcagcagctgctgcagcggtggtggcggagggcgcggaggccggggcggcggggccaggcgcgggcggcgcggggagcggcgagggtgcacgcagcaagccatatacgcggcggcccaagcccccctactcgtacatcgcgctcatcgccatggccatccgcgactcggcgggcgggcgcttgacgctggcggagatcaacgagtacctcatgggcaagttcccctttttccgcggcagctacacgggctggcgcaactccgtgcgccacaacctttcgctcaacgactgcttcgtcaaggtgctgcgcgacccctcgcggccctggggcaaggacaactactggatgctcaaccccaacagcgagtacaccttcgccgacggggtcttccgccgccgccgcaagcgcctcagccaccgcgcgccggtccccgcgcccgggctgcggcccgaggaggccccgggcctccccgccgccccgccgcccgcgcccgccgccccggcctcgccccgcatgcgctcgcccgcccgccaggaggagcgcgccagccccgcgggcaagttctccagctccttcgccatcgacagcatcctgcgcaagcccttccgcagccgccgcctcagggacacggcccccgggacgacgcttcagtggggcgccgcgccctgcccgccgctgcccgcgttccccgcgctcctccccgcggcgccctgcagggccctgctgccgctctgcgcgtacggcgcgggcgagccggcgcggctgggcgcgcgcgaggccgaggtgccaccgaccgcgccgcccctcctgcttgcacctctcccggcggcggcccccgccaagccactccgaggcccggcggccggcggcgcgcacctgtactgccccctgcggctgcccgcagccctgcaggcggcctcagtccgccgccctggcccgcacctgccgtacccggtggagacgctcctagcctgagtagcgccgcggggcccgggaacgccgagtgcgcgccgtcggggaggcgggaacgcgggcccgcgcgcggactttgcactttgaatccagaggaagatgaatttttaaaatctccatcaaacgtgccttaaagctaaagcattttgacaggagtatttaaacttagtccaggatattttcctttgtgttttataactttacagaggaccaaagcaattcttgttttagtttctttgcgaagcctgctcctccttcccttcataaggactttttttgtctttctttaacgcccaggcttcgtcttatttctactgtttttgtcgcaacttccattgatttatgtcccttccctcccccctaagtacatcagggaacctttccacactataaatgatatgactactgtttggggtttctgggcccccatccgtgtacgtatgtggcatttccaggtatgactgagtgtgagagacatgtcagaggctcttcagtgatttcttgctattgaccgatgcttcactgtgccaaaagagaaaaaaaatgttgggttttgtaattaaattatttatatatttttgaaacccgaattgaaaatgttgcaggcaacgggctacagctttattagtggttctctaactgtggtctccttgggccaagcaatttctttaaaggaaaagttgattatgtatgtggggtgccaggaccactgccttgaaagcaagtgtgatttttatttttaatattattttatttgtgtctgtgtacatattcatgtataaattttatgaaacccaagcatagtgcttattttttaataaaacaactgacttaacacattgtgaaaaaaaaaaaaaaaaaaaa

SEQ ID NO: 31 - DNA, 879 bp, Homo sapiens
gcggagtctccaactgggagagctgcagctgccgagaggaggagaacgctgaggtcggtcggaccaacggacgcgctgaccgctgccaactgcagctcgcgctgcctcctgctcgcgccgtgccactaaggtcactcccgcctccgagagcccagagccgagatggaaacggtccaggagctgatccccctggccaaggagatgatggcccagaagcgcaaggggaagatggtgaagctgtacgtgctgggcagcgtgctggccctcttcggcgtggtgctcggcctgatggagactgtgtgcagccccttcacggccgccagacgtctgcgggaccaggaggcagccgtggcggagctgcaggccgccctggagcgacaggctctccagaagcaagccctgcaggagaaaggcaagcagcaggacacggtcctcggcggccgggccctgtccaaccggcagcacgcctcctaggaactgtgggagaccagcggagtgggagggagacgcagtagacagagacagaccgagaaggaagggagagacagagggggcgcgcgcacaggagcctgactccgctgggagagtgcaggagcacgtgctgttttttatttggacttaacttcagagaaaccgctgacatctagaactgacctaccacaagcatccaccaaaggagtttgggattgagttttgctgctgtgcagcactgcattgtcatgacatttccaacactgtgtgaattatctaaatgcgtctaccattttgcactagggaggaaggataaatgctttttatgttattattattaattattacaatgaccaccattttgcattttgaaataaaaaactttttataccaaaaaaaaaaaaaaaa

SEQ ID NO: 32 - DNA, 1220 bp, Homo sapiens
agtcccagctcagagccgcaacctgcacagccatgcccgggcaagaactcaggacggtgaatggctctcagatgctcctggtgttgctggtgctctcgtggctgccgcatgggggcgccctgtctctggccgaggcgagccgcgcaagtttcccgggaccctcagagttgcactccgaagactccagattccgagagttgcggaaacgctacgaggacctgctaaccaggctgcgggccaaccagagctgggaagattcgaacaccgacctcgtcccggcccctgcagtccggatactcacgccagaagtgcggctgggatccggcggccacctgcacctgcgtatctctcgggccgcccttcccgaggggctccccgaggcctcccgccttcaccgggctctgttccggctgtccccgacggcgtcaaggtcgtgggacgtgacacgaccgctgcggcgtcagctcagccttgcaagaccccaggcgcccgcgctgcacctgcgactgtcgccgccgccgtcgcagtcggaccaactgctggcagaatcttcgtccgcacggccccagctggagttgcacttgcggccgcaagccgccagggggcgccgcagagcgcgtgcgcgcaacggggaccactgtccgctcgggcccgggcgttgctgccgtctgcacacggtccgcgcgtcgctggaagacctgggctgggccgattgggtgctgtcgccacgggaggtgcaagtgaccatgtgcatcggcgcgtgcccgagccagttccgggcggcaaacatgcacgcgcagatcaagacgagcctgcaccgcctgaagcccgacacggtgccagcgccctgctgcgtgcccgccagctacaatcccatggtgctcattcaaaagaccgacaccggggtgtcgctccagacctatgatgacttgttagccaaagactgccactgcatatgagcagtcctggtccttccactgtgcacctgcgcggaggacgcgacctcagttgtcctgccctgtggaatgggctcaaggttcctgagacacccgattcctgcccaaacagctgtatttatataagtctgttatttattattaatttattggggtgaccttcttggggactcgggggctggtctgatggaactgtgtatttatttaaaactctggtgataaaaataaagctgtctgaactgttaaaaaaaaaaaaaaaaaaaa

SEQ ID NO: 33 - DNA, 2371 bp, Homo sapiens
ccggagcctgcggcgggcggctgtgacggccccggcgctgacggcggcggccgggggggcggtgtcgacgcccgcggcgccggctggggcatcaccgcgggcctcgaccccgaaatggcgctgctggccgaacacttgctgaagccgctgcccgcggacaagcagatcgagaccgggcccttcctcgaggcggtgtcccacctgccgcccttcttcgattgccttgggtccccagtgtttactcccatcaaggcagacataagcggcaacatcacgaaaatcaaagctgtgtacgacaccaacccagccaagttccggaccctgcagaacatcctggaggtggagaaagaaatgtatggagcagagtggcccaaagtaggggccacactggcgctgatgtggctgaaaagaggcctccgcttcatccaggtcttcctccagagcatctgcgacggggagcgggacgagaaccaccccaacctcatccgtgtcaacgccaccaaggcctacgagatggccctcaagaagtaccatggctggatcgtgcagaagatcttccaggcagcactgtacgcagcaccctataagtctgacttcctgaaagcgctctccaaggggcagaatgttacggaggaggagtgcctggagaagatccgcctcttcctagtcaactacacggcgaccatcgatgtcatctacgagatgtacacccagatgaacgctgagcttaactacaaggtgtaggcatgcccactgctggacacgtccccgactcgtggccacatggagaaacaggcaaaccagaatcactgtgaatcaagtcggtgaactgcccctggcctgtgtcccccagagcagcccagggtcctgccagagtctgcaggggacagccctcgttttttaagtcttttttttttttttttttggtctattctaaaggaccagtaaataatgatcttacttccaaatctccttggaatttcacgacagcacagactgactttataccttcatttcagcgtggtaaaaaccgattaacacttctaatgagtcaagtcctagggttttttggttttgttttgttgccaacgaggaacacagctctgggggaatggtgtcatccacctcgctttaaaaataagcacatgatggctgggcaccgtggctcacgcctgtaatcccagcactttgggaggctgaggcgggtggatcacctgaggtcgggagtttgagaccagcctggccaacatggtgaaaccccatcgctactaaaaatataaaaaattagctgggcatggtggcgcacgcctgtagttccagctactcaggaggctgaggcaggagaatcgcttgaacccgggaggtggaggttgcagtgagctgagatcgcaccattgcactccagcctgggcaacaagagcgaaactctgtctcaaaaaaaaaaaaaagaggtgggtggattacttgaggtcagggtttgagatcagcctgaccaacatggtgaaaccctatctctactaaaaatatagaattagccaggcatggtagcgcacgcctgtaatcccatcttcttgggaggctgaggcaggagaatcgctagaaactgggaggtggaggttacagtagccgagatcgcgccactgcattccagcctgggcaacaaaagcgaaactctgtctcaaaaaagaaaaaaaagaaaaaaaagcacgtgaccttatgaggctctcgctgtattgttattttaaggactataaagagtttgatttaaaattatgcagggcccctatgtgggattttttaaaaagcaaactggtgtgtattctcatgtggtttgcacagcccagcctcacagcactattgtaaaccctgctctttctgtctcgctagacagatttttttgtttgttttcttttttctggttgttttttgttgttgttgttgttgttttacagctgaaaccaaccagcaagcccttgatgaccaagaggcgtttctttcaaagctatagggcacaaacaattgaccatagatgactccgtttgcattcttctgcagaattatttccttcagggacagattttccaacctaagaaactacctaccgtgtgtattctcttgacggggagagatgaacccttcagctgctaagatccaagaaaacgcctcactgccttaaccttaactgttcttcctggcgctaaaaagagctgtattttttaaagtgctggggcaaacaaagcaaccccaaaagagttgatgtgtgttttaaaagaaaaaacccaatgaggaacaattggagatttttatgcagaaactaaataatccttaataaataaatctctattttggaatcacaaaaaaaaaaaaaaaa

SEQ ID NO: 34 - DNA, 2360 bp, Homo sapiens
gctacgcgggccacgctgctggctggcctgacctaggcgcgcggggtcgggcggccgcgcgggcgggctgagtgagcaagacaagacactcaagaagagcgagctgcgcctgggtcccggccaggcttgcacgcagaggcgggcggcagacggtgcccggcggaatctcctgagctccgccgcccagctctggtgccagcgcccagtggccgccgcttcgaaagtgactggtgcctcgccgcctcctctcggtgcgggaccatgaagctgctgccgtcggtggtgctgaagctctttctggctgcagttctctcggcactggtgactggcgagagcctggagcggcttcggagagggctagctgctggaaccagcaacccggaccctcccactgtatccacggaccagctgctacccctaggaggcggccgggaccggaaagtccgtgacttgcaagaggcagatctggaccttttgagagtcactttatcctccaagccacaagcactggccacaccaaacaaggaggagcacgggaaaagaaagaagaaaggcaaggggctagggaagaagagggacccatgtcttcggaaatacaaggacttctgcatccatggagaatgcaaatatgtgaaggagctccgggctccctcctgcatctgccacccgggttaccatggagagaggtgtcatgggctgagcctcccagtggaaaatcgcttatatacctatgaccacacaaccatcctggccgtggtggctgtggtgctgtcatctgtctgtctgctggtcatcgtggggcttctcatgtttaggtaccataggagaggaggttatgatgtggaaaatgaagagaaagtgaagttgggcatgactaattcccactgagagagacttgtgctcaaggaatcggctggggactgctacctctgagaagacacaaggtgatttcagactgcagaggggaaagacttccatctagtcacaaagactccttcgtccccagttgccgtctaggattgggcctcccataattgctttgccaaaataccagagccttcaagtgccaaacagagtatgtccgatggtatctgggtaagaagaaagcaaaagcaagggaccttcatgcccttctgattcccctccaccaaaccccacttcccctcataagtttgtttaaacacttatcttctggattagaatgccggttaaattccatatgctccaggatctttgactgaaaaaaaaaaagaagaagaagaaggagagcaagaaggaaagatttgtgaactggaagaaagcaacaaagattgagaagccatgtactcaagtaccaccaagggatctgccattgggaccctccagtgctggatttgatgagttaactgtgaaataccacaagcctgagaactgaattttgggacttctacccagatggaaaaataacaactatttttgttgttgttgtttgtaaatgcctcttaaattatatatttattttattctatgtatgttaatttatttagtttttaacaatctaacaataatatttcaagtgcctagactgttactttggcaatttcctggccctccactcctcatccccacaatctggcttagtgccacccacctttgccacaaagctaggatggttctgtgacccatctgtagtaatttattgtctgtctacatttctgcagatcttccgtggtcagagtgccactgcgggagctctgtatggtcaggatgtaggggttaacttggtcagagccactctatgagttggacttcagtcttgcctaggcgattttgtctaccatttgtgttttgaaagcccaaggtgctgatgtcaaagtgtaacagatatcagtgtctccccgtgtcctctccctgccaagtctcagaagaggttgggcttccatgcctgtagctttcctggtccctcacccccatggccccaggccacagcgtgggaactcactttcccttgtgtcaagacatttctctaactcctgccattcttctggtgctactccatgcaggggtcagtgcagcagaggacagtctggagaaggtattagcaaagcaaaaggctgagaaggaacagggaacattggagctgactgttcttggtaactgattacctgccaattgctaccgagaaggttggaggtggggaaggctttgtataatcccacccacctcaccaaaacgatgaaggtatgctgtcatggtcctttctggaagtttctggtgccatttctgaactgttacaacttgtatttccaaacctggttcatatttatactttgcaatccaaataaagataacccttattccataaaaaaaaaaaaaaaaaa

SEQ ID NO: 35 - DNA, 1254 bp, Homo sapiens
ctcacttggccttacactccgctcggctcaccatgtgtcactctcgcagctgccacccgaccatgaccatcctgcaggccccgaccccggccccctccaccatcccgggaccccggcggggctccggtcctgagatcttcaccttcgaccctctcccggagcccgcagcggcccctgccgggcgccccagcgcctctcgcgggcaccgaaagcgcagccgcagggttctctaccctcgagtggtccggcgccagctgccagtcgaggaaccgaacccagccaaaaggcttctctttctgctgctcaccatcgtcttctgccagatcctgatggctgaagagggtgtgccggcgcccctgcctccagaggacgcccctaacgccgcatccctggcgcccacccctgtgtccgccgtcctcgagccctttaatctgacttcggagccctcggactacgctctggacctcagcactttcctccagcaacacccggccgccttctaactgtgactccccgcactccccaaaaagaatccgaaaaaccacaaagaaacaccaggcgtacctggtgcgcgagagcgtatccccaactgggacttccgaggcaacttgaactcagaacactacagcggagacgccacccggtgcttgaggcgggaccgaggcgcacagagaccgaggcgcatagagaccgaggcacagcccagctggggctaggcccggtgggaaggagagcgtcgttaatttatttcttattgctcctaattaatatttatatgtatttatgtacgtcctcctaggtgatggagatgtgtacgtaatatttattttaacttatgcaagggtgtgagatgttccccctgctgtaaatgcaggtctcttggtatttattgagctttgtgggactggtggaagcaggacacctggaactgcggcaaagtaggagaagaaatggggaggactcgggtgggggaggacgtcccggctgggatgaagtctggtggtgggtcgtaagtttaggaggtgactgcatcctccagcatctcaactccgtctgtctactgtgtgagacttcggcggaccattaggaatgagatccgtgagatccttccatcttcttgaagtcgcctttagggtggctgcgaggtagagggttgggggttggtgggctgtcacggagcgactgtcgagatcgcctagtatgttctgtgaacacaaataaaattgatttactgtctgcaaaaaaaaaaaaaaa

SEQ ID NO: 36 - DNA, 1376 bp, Homo sapiens
gtaagaacactctcgtgagtctaacggtcttccggatgaaggctatttgaagtcgccataacctggtcagaagtgtgcctgtcggcggggagagaggcaatatcaaggttttaaatctcggagaaatggctttcgtttgcttggctatcggatgcttatatacctttctgataagcacaacatttggctgtacttcatcttcagacaccgagataaaagttaaccctcctcaggattttgagatagtggatcccggatacttaggttatctctatttgcaatggcaacccccactgtctctggatcattttaaggaatgcacagtggaatatgaactaaaataccgaaacattggtagtgaaacatggaagaccatcattactaagaatctacattacaaagatgggtttgatcttaacaagggcattgaagcgaagatacacacgcttttaccatggcaatgcacaaatggatcagaagttcaaagttcctgggcagaaactacttattggatatcaccacaaggaattccagaaactaaagttcaggatatggattgcgtatattacaattggcaatatttactctgttcttggaaacctggcataggtgtacttcttgataccaattacaacttgttttactggtatgagggcttggatcatgcattacagtgtgttgattacatcaaggctgatggacaaaatataggatgcagatttccctatttggaggcatcagactataaagatttctatatttgtgttaatggatcatcagagaacaagcctatcagatccagttatttcacttttcagcttcaaaatatagttaaacctttgccgccagtctatcttacttttactcgggagagttcatgtgaaattaagctgaaatggagcatacctttgggacctattccagcaaggtgttttgattatgaaattgagatcagagaagatgatactaccttggtgactgctacagttgaaaatgaaacatacaccttgaaaacaacaaatgaaacccgacaattatgctttgtagtaagaagcaaagtgaatatttattgctcagatgacggaatttggagtgagtggagtgataaacaatgctgggaaggtgaagacctatcgaagaaaactttgctacgtttctggctaccatttggtttcatcttaatattagttatatttgtaaccggtctgcttttgcgtaagccaaacacctacccaaaaatgattccagaatttttctgtgatacatgaagactttccatatcaagagacatggtattgactcaacagtttccagtcatggccaaatgttcaatatgagtctcaataaactgaatttttcttgcgaatgttgaaaaa

SEQ ID NO: 37 - DNA, 2943 bp, Homo sapiens
accaggcaacaccattgaaggctcatatgtaaaaatccatgccttcctttctcccaatctccattcccaaacttagccactggcttctggctgaggccttacgcatacctcccggggcttgcacacaccttcttctacagaagacacaccttgggcatatcctacagaagaccaggcttctctctggtccttggtagagggctactttactgtaacagggccagggtggagagttctctcctgaagctccatcccctctataggaaatgtgttgacaatattcagaagagtaagaggatcaagacttctttgtgctcaaataccactgttctcttctctaccctgccctaaccaggagcttgtcaccccaaactctgaggtgatttatgccttaatcaagcaaacttccctcttcagaaaagatggctcattttccctcaaaagttgccaggagctgccaagtattctgccaattcaccctggagcacaatcaacaaattcagccagaacacaactacagctactattagaactattattattaataaattcctctccaaatctagccccttgacttcggatttcacgatttctcccttcctcctagaaacttgataagtttcccgcgcttccctttttctaagactacatgtttgtcatcttataaagcaaaggggtgaataaatgaaccaaatcaataacttctggaatatctgcaaacaacaataatatcagctatgccatctttcactattttagccagtatcgagttgaatgaacatagaaaaatacaaaactgaattcttccctgtaaattccccgttttgacgacgcacttgtagccacgtagccacgcctacttaagacaattacaaaaggcgaagaagactgactcaggcttaagctgccagccagagagggagtcatttcattggcgtttgagtcagcaaagaagtcaagatggccaaagttccagacatgtttgaagacctgaagaactgttacagtgaaaatgaagaagacagttcctccattgatcatctgtctctgaatcagaaatccttctatcatgtaagctatggcccactccatgaaggctgcatggatcaatctgtgtctctgagtatctctgaaacctctaaaacatccaagcttaccttcaaggagagcatggtggtagtagcaaccaacgggaaggttctgaagaagagacggttgagtttaagccaatccatcactgatgatgacctggaggccatcgccaatgactcagaggaagaaatcatcaagcctaggtcagcaccttttagcttcctgagcaatgtgaaatacaactttatgaggatcatcaaatacgaattcatcctgaatgacgccctcaatcaaagtataattcgagccaatgatcagtacctcacggctgctgcattacataatctggatgaagcagtgaaatttgacatgggtgcttataagtcatcaaaggatgatgctaaaattaccgtgattctaagaatctcaaaaactcaattgtatgtgactgcccaagatgaagaccaaccagtgctgctgaaggagatgcctgagatacccaaaaccatcacaggtagtgagaccaacctcctcttcttctgggaaactcacggcactaagaactatttcacatcagttgcccatccaaacttgtttattgccacaaagcaagactactgggtgtgcttggcaggggggccaccctctatcactgactttcagatactggaaaaccaggcgtaggtctggagtctcacttgtctcacttgtgcagtgttgacagttcatatgtaccatgtacatgaagaagctaaatcctttactgttagtcatttgctgagcatgtactgagccttgtaattctaaatgaatgtttacactctttgtaagagtggaaccaacactaacatataatgttgttatttaaagaacaccctatattttgcatagtaccaatcattttaattattattcttcataacaattttaggaggaccagagctactgactatggctaccaaaaagactctacccatattacagatgggcaaattaaggcataagaaaactaagaaatatgcacaatagcagttgaaacaagaagccacagacctaggatttcatgatttcatttcaactgtttgccttctacttttaagttgctgatgaactcttaatcaaatagcataagtttctgggacctcagttttatcattttcaaaatggagggaataatacctaagccttcctgccgcaacagttttttatgctaatcagggaggtcattttggtaaaatacttcttgaagccgagcctcaagatgaaggcaaagcacgaaatgttattttttaattattatttatatatgtatttataaatatatttaagataattataatatactatatttatgggaaccccttcatcctctgagtgtgaccaggcatcctccacaatagcagacagtgttttctgggataagtaagtttgatttcattaatacagggcattttggtccaagttgtgcttatcccatagccaggaaactctgcattctagtacttgggagacctgtaatcatataataaatgtacattaattaccttgagccagtaattggtccgatctttgactcttttgccattaaacttacctgggcattcttgtttcaattccacctgcaatcaagtcctacaagctaaaattagatgaactcaactttgacaaccatgagaccactgttatcaaaactttcttttctggaatgtaatcaatgtttcttctaggttctaaaaattgtgatcagaccataatgttacattattatcaacaatagtgattgatagagtgttatcagtcataactaaataaagcttgcaacaaaattctctgacaaaaaaaaaaaaaaaa

SEQ ID NO: 38 - DNA, 1498 bp, Homo sapiens
accaaacctcttcgaggcacaaggcacaacaggctgctctgggattctcttcagccaatcttcattgctcaagtgtctgaagcagccatggcagaagtacctgagctcgccagtgaaatgatggcttattacagtggcaatgaggatgacttgttctttgaagctgatggccctaaacagatgaagtgctccttccaggacctggacctctgccctctggatggcggcatccagctacgaatctccgaccaccactacagcaagggcttcaggcaggccgcgtcagttgttgtggccatggacaagctgaggaagatgctggttccctgcccacagaccttccaggagaatgacctgagcaccttctttcccttcatctttgaagaagaacctatcttcttcgacacatgggataacgaggcttatgtgcacgatgcacctgtacgatcactgaactgcacgctccgggactcacagcaaaaaagcttggtgatgtctggtccatatgaactgaaagctctccacctccagggacaggatatggagcaacaagtggtgttctccatgtcctttgtacaaggagaagaaagtaatgacaaaatacctgtggccttgggcctcaaggaaaagaatctgtacctgtcctgcgtgttgaaagatgataagcccactctacagctggagagtgtagatcccaaaaattacccaaagaagaagatggaaaagcgatttgtcttcaacaagatagaaatcaataacaagctggaatttgagtctgcccagttccccaactggtacatcagcacctctcaagcagaaaacatgcccgtcttcctgggagggaccaaaggcggccaggatataactgacttcaccatgcaatttgtgtcttcctaaagagagctgtacccagagagtcctgtgctgaatgtggactcaatccctagggctggcagaaagggaacagaaaggtttttgagtacggctatagcctggactttcctgttgtctacaccaatgcccaactgcctgccttagggtagtgctaagaggatctcctgtccatcagccaggacagtcagctctctcctttcagggccaatccccagcccttttgttgagccaggcctctctcacctctcctactcacttaaagcccgcctgacagaaaccacggccacatttggttctaagaaaccctctgtcattcgctcccacattctgatgagcaaccgcttccctatttatttatttatttgtttgtttgttttattcattggtctaatttattcaaagggggcaagaagtagcagtgtctgtaaaagagcctagtttttaatagctatggaatcaattcaatttggactggtgtgctctctttaaatcaagtcctttaattaagactgaaaatatataagctcagattatttaaatgggaatatttataaatgagcaaatatcatactgttcaatggttctgaaataaacttcactgaag

SEQ ID NO: 39 - DNA, 1666 bp, Homo sapiens
ctccataaggcacaaactttcagagacagcagagcacacaagcttctaggacaagagccaggaagaaaccaccggaaggaaccatctcactgtgtgtaaacatgacttccaagctggccgtggctctcttggcagccttcctgatttctgcagctctgtgtgaaggtgcagttttgccaaggagtgctaaagaacttagatgtcagtgcataaagacatactccaaacctttccaccccaaatttatcaaagaactgagagtgattgagagtggaccacactgcgccaacacagaaattattgtaaagctttctgatggaagagagctctgtctggaccccaaggaaaactgggtgcagagggttgtggagaagtttttgaagagggctgagaattcataaaaaaattcattctctgtggtatccaagaatcagtgaagatgccagtgaaacttcaagcaaatctacttcaacacttcatgtattgtgtgggtctgttgtagggttgccagatgcaatacaagattcctggttaaatttgaatttcagtaaacaatgaatagtttttcattgtaccatgaaatatccagaacatacttatatgtaaagtattatttatttgaatctacaaaaaacaacaaataatttttaaatataaggattttcctagatattgcacgggagaatatacaaatagcaaaattgaggccaagggccaagagaatatccgaactttaatttcaggaattgaatgggtttgctagaatgtgatatttgaagcatcacataaaaatgatgggacaataaattttgccataaagtcaaatttagctggaaatcctggatttttttctgttaaatctggcaaccctagtctgctagccaggatccacaagtccttgttccactgtgccttggtttctcctttatttctaagtggaaaaagtattagccaccatcttacctcacagtgatgttgtgaggacatgtggaagcactttaagttttttcatcataacataaattattttcaagtgtaacttattaacctatttattatttatgtatttatttaagcatcaaatatttgtgcaagaatttggaaaaatagaagatgaatcattgattgaatagttataaagatgttatagtaaatttattttattttagatattaaatgatgttttattagataaatttcaatcagggtttttagattaaacaaacaaacaattgggtacccagttaaattttcatttcagataaacaacaaataattttttagtataagtacattattgtttatctgaaattttaattgaactaacaatcctagtttgatactcccagtcttgtcattgccagctgtgttggtagtgctgtgttgaattacggaataatgagttagaactattaaaacagccaaaactccacagtcaatattagtaatttcttgctggttgaaacttgtttattatgtacaaatagattcttataatattatttaaatgactgcatttttaaatacaaggctttatatttttaactttaagatgtttttatgtgctctccaaattttttttactgtttctgattgtatggaaatataaaagtaaatatgaaacatttaaaatataatttgttgtcaaagtaaaaaaaaaaaaaaa

SEQ ID NO: 40 - DNA, 7878 bp, Homo sapiens
ttttccctgctctcaccgggcgggggagagaagccctctggacagcttctagagtgtgcaggttctcgtatccctcggccaagggtatcctctgcaaacctctgcaaacccagcgcaactacggtcccccggtcagacccaggatggggccagaacggacaggggccgcgccgctgccgctgctgctggtgttagcgctcagtcaaggcattttaaattgttgtttggcctacaatgttggtctcccagaagcaaaaatattttccggtccttcaagtgaacagtttggctatgcagtgcagcagtttataaatccaaaaggcaactggttactggttggttcaccctggagtggctttcctgagaaccgaatgggagatgtgtataaatgtcctgttgacctatccactgccacatgtgaaaaactaaatttgcaaacttcaacaagcattccaaatgttactgagatgaaaaccaacatgagcctcggcttgatcctcaccaggaacatgggaactggaggttttctcacatgtggtcctctgtgggcacagcaatgtgggaatcagtattacacaacgggtgtgtgttctgacatcagtcctgattttcagctctcagccagcttctcacctgcaactcagccctgcccttccctcatagatgttgtggttgtgtgtgatgaatcaaatagtatttatccttgggatgcagtaaagaattttttggaaaaatttgtacaaggcctggatataggccccacaaagacacaggtggggttaattcagtatgccaataatccaagagttgtgtttaacttgaacacatataaaaccaaagaagaaatgattgtagcaacatcccagacatcccaatatggtggggacctcacaaacacattcggagcaattcaatatgcaagaaaatatgcttattcagcagcttctggtgggcgacgaagtgctacgaaagtaatggtagttgtaactgacggtgaatcacatgatggttcaatgttgaaagctgtgattgatcaatgcaaccatgacaatatactgaggtttggcatagcagttcttgggtacttaaacagaaacgcccttgatactaaaaatttaataaaagaaataaaagcaatcgctagtattccaacagaaagatactttttcaatgtgtctgatgaagcagctctactagaaaaggctgggacattaggagaacaaattttcagcattgaaggtactgttcaaggaggagacaactttcagatggaaatgtcacaagtgggattcagtgcagattactcttctcaaaatgatattctgatgctgggtgcagtgggagcttttggctggagtgggaccattgtccagaagacatctcatggccatttgatctttcctaaacaagcctttgaccaaattctgcaggacagaaatcacagttcatatttaggttactctgtggctgcaatttctactggagaaagcactcactttgttgctggtgctcctcgggcaaattataccggccagatagtgctatatagtgtgaatgagaatggcaatatcacggttattcaggctcaccgaggtgaccagattggctcctattttggtagtgtgctgtgttcagttgatgtggataaagacaccattacagacgtgctcttggtaggtgcaccaatgtacatgagtgacctaaagaaagaggaaggaagagtctacctgtttactatcaaagagggcattttgggtcagcaccaatttcttgaaggccccgagggcattgaaaacactcgatttggttcagcaattgcagctctttcagacatcaacatggatggctttaatgatgtgattgttggttcaccactagaaaatcagaattctggagctgtatacatttacaatggtcatcagggcactatccgcacaaagtattcccagaaaatcttgggatccgatggagcctttaggagccatctccagtactttgggaggtccttggatggctatggagatttaaatggggattccatcaccgatgtgtctattggtgcctttggacaagtggttcaactctggtcacaaagtattgctgatgtagctatagaagcttcattcacaccagaaaaaatcactttggtcaacaagaatgctcagataattctcaaactctgcttcagtgcaaagttcagacctactaagcaaaacaatcaagtggccattgtatataacatcacacttgatgcagatggattttcatccagagtaacctccagggggttatttaaagaaaacaatgaaaggtgcctgcagaagaatatggtagtaaatcaagcacagagttgccccgagcacatcatttatatacaggagccctctgatgttgtcaactctttggatttgcgtgtggacatcagtctggaaaaccctggcactagccctgcccttgaagcctattctgagactgccaaggtcttcagtattcctttccacaaagactgtggtgaggacggactttgcatttctgatctagtcctagatgtccgacaaataccagctgctcaagaacaaccctttattgtcagcaaccaaaacaaaaggttaacattttcagtaacgctgaaaaataaaagggaaagtgcatacaacactggaattgttgttgatttttcagaaaacttgttttttgcatcattctccctgccggttgatgggacagaagtaacatgccaggtggctgcatctcagaagtctgttgcctgcgatgtaggctaccctgctttaaagagagaacaacaggtgacttttactattaactttgacttcaatcttcaaaaccttcagaatcaggcgtctctcagtttccaagccttaagtgaaagccaagaagaaaacaaggctgataatttggtcaacctcaaaattcctctcctgtatgatgctgaaattcacttaacaagatctaccaacataaatttttatgaaatctcttcggatgggaatgttccttcaatcgtgcacagttttgaagatgttggtccaaaattcatcttctccctgaaggtaacaacaggaagtgttccagtaagcatggcaactgtaatcatccacatccctcagtataccaaagaaaagaacccactgatgtacctaactggggtgcaaacagacaaggctggtgacatcagttgtaatgcagatatcaatccactgaaaataggacaaacatcttcttctgtatctttcaaaagtgaaaatttcaggcacaccaaagaattgaactgcagaactgcttcctgtagtaatgttacctgctggttgaaagacgttcacatgaaaggagaatactttgttaatgtgactaccagaatttggaacgggactttcgcatcatcaacgttccagacagtacagctaacggcagctgcagaaatcaacacctataaccctgagatatatgtgattgaagataacactgttacgattcccctgatgataatgaaacctgatgagaaagccgaagtaccaacaggagttataataggaagtataattgctggaatccttttgctgttagctctggttgcaattttatggaagctcggcttcttcaaaagaaaatatgaaaagatgaccaaaaatccagatgagattgatgagaccacagagctcagtagctgaaccagcagacctacctgcagtgggaaccggcagcatcccagccagggtttgctgtttgcgtgaatggatttctttttaaatcccatattttttttatcatgtcgtaggtaaactaacctggtattttaagagaaaactgcaggtcagtttggaatgaagaaattgtggggggtgggggaggtgcggggggcaggtagggaaataatagggaaaatacctattttatatgatgggggaaaaaaagtaatctttaaactggctggcccagagtttacattctaatttgcattgtgtcagaaacatgaaatgcttccaagcatgacaacttttaaagaaaaatatgatactctcagattttaagggggaaaactgttctctttaaaatatttgtctttaaacagcaactacagaagtggaagtgcttgatatgtaagtacttccacttgtgtatattttaatgaatattgatgttaacaagaggggaaaacaaaacacaggttttttcaatttatgctgctcatccaaagttgccacagatgatacttccaagtgataattttatttataaactaggtaaaatttgttgttggttccttttagaccacggctgccccttccacaccccatcttgctctaatgatcaaaacatgcttgaataactgagcttagagtatacctcctatatgtccatttaagttaggagagggggcgatatagagaataaggcacaaaattttgtttaaaactcagaatataacatgtaaaatcccatctgctagaagcccatcctgtgccagaggaaggaaaaggaggaaatttcctttctcttttaggaggcacaacagttctcttctaggatttgtttggctgactggcagtaacctagtgaatttctgaaagatgagtaatttctttggcaaccttcctcctcccttactgaaccactctcccacctcctggtggtaccattattatagaagccctctacagcctgactttctctccagcggtccaaagttatcccctcctttacccctcatccaaagttcccactccttcaggacagctgctgtgcattagatattaggggggaaagtcatctgtttaatttacacacttgcatgaattactgtatataaactccttaacttcagggagctattttcatttagtgctaaacaagtaagaaaaataagctcgagtgaatttctaaatgttggaatgttatgggatgtaaacaatgtaaagtaagacatctcaggatttcaccagaagttacagatgaggcactggaagccaccaaattagcaggtgcaccttctgtggctgtcttgtttctgaagtacttaaacttccacaagagtgaatttgacctaggcaagtttgttcaaaaggtagatcctgagatgatttggtcagattgggataaggcccagcaatctgcattttaacaagcaccccagtcactaggatgcagatggaccacactttgagaaacaccacccatttctactttttgcaccttattttctctgttcctgagcccccacattctctaggagaaacttagaggaaaagggcacagacactacatatctaaagctttggacaagtccttgacctctataaacttcagagtcctcattataaaatgggaagactgagctggagttcagcagtgatgcttttagttttaaaagtctatgatctggacttcctataatacaaatacacaatcctccaagaatttgacttggaaaaaaatgtcaaaggaaaacaggttatctgcccatgtgcatatggacaaccttgactaccctggcctggcccgtggtggcagtccagggctatctgtactgtttacagaattactttgtagttgacaacacaaaacaaacaaaaaaggcataaaatgccagcggtttatagaaaaaacagcatggtattctccagttaggtatgccagagtccaattcttttaacagctgtgagaatttgctgcttcattccaacaaaattttatttaaaaaaaaaaaaaaaagactggagaaactagtcattagcttgataaagaatatttaacagctagtggtgctggtgtgtacctgaagctccagctacttgagagactgagacaggaagatcgcttgagcccaggagttcaagtccagcctaagcaacatagcaagaccctgtctcaaaaaaatgactatttaaaaagacaatgtggccaggcacggtggctcacacctgtaatcccaacactttgggaggctgaggccggtggatcacgaggtcaggagtttgagactagcctggccaacatggtgaaaccccatctctaataatataaaaattagctgggcgtagtagcaggtgcctgtaatcccagttactcgggaagctgaggcaggagaatcacttgaacccgggaggcagaggtttcagtgagccgagatcgcgccactgcactccagcctgggtgacagggcaagactctgtctcaaacaaacaaacaaaaaaaaagttagtactgtatatgtaaatactagcttttcaatgtgctatacaaacaattatagcacatccttccttttactctgtctcacctcctttaggtgagtacttccttaaataagtgctaaacatacatatacggaacttgaaagctttggttagccttgccttaggtaatcagcctagtttacactgtttccagggagtagttgaattactataaaccattagccacttgtctctgcaccatttatcacaccaggacagggtctctcaacctgggcgctactgtcatttggggccaggtgattcttccttgcaggggctgtcctgtaccttgtaggacagcagccctgtcctagaaggtatgtttagcagcattcctggcctctagctacccgatgccagagcatgctccccccgcagtcatgacaatcaaaaaatgtctccagacattgtcaaatgcctcctggggggcagtatttctcaagcacttttaagcaaaggtaagtattcatacaagaaatttagggggaaaaaacattgtttaaataaaagctatgtgttcctattcaacaatatttttgctttaaaagtaagtagagggcataaaagatgtcatattcaaatttccatttcataaatggtgtacagacaaggtctatagaatgtggtaaaaacttgactgcaacacaaggcttataaaatagtaagatagtaaaatagcttatgaagaaactacagagatttaaaattgtgcatgactcatttcagcagcaaaataagaactcctaactgaacagaaatttttctacctagcaatgttattcttgtaaaatagttacctattaaaactgtgaagagtaaaactaaagccaatttattatagtcacacaagtgattatactaaaaattattataaaggttataattttataatgtatttacctgtcctgatatatagctataacccaatatatgaaaatctcaaaaattaagacatcatcatacagaaggcaggattccttaaactgagatccctgatccatctttaatatttcaatttgcacacataaaacaatgcccttttgtgtacattcaggcatacccattttaatcaatttgaaaggttaatttaaacctctagaggtgaatgagaaacatgggggaaaagtatgaaataggtgaaaatcttaactatttctttgaactctaaagactgaaactgtagccattatgtaaataaagtttcatatgtacctgtttattttggcagattaagtcaaaatatgaatgtatatattgcataactatgttagaattgtatatattttaaagaaattgtcttggatattttcctttatacataatagataagtcttttttcaaatgtggtgtttgatgtttttgattaaatgtgttttgcctctttccacaaaaactgtaaaaataaatgcatgtttgtacaaaaagttgcagaattcatttgatttatgagaaacaaaaattaaattgtagtcaacagttagtagtttttctcatatccaagtataacaaacagaaaagtttcattattgtaacccacttttttcataccacattattgaatattgttacaattgttttgaaaataaagccattttctttgggcttttataagttaaaaaaaaaa

SEQ ID NO: 41 - DNA, 9042 bp, Homo sapiens
gcgcgccaagacgtgggcacctcctcacccggaccccgggccccgccgagccgcctcctggctcccgtggccgccagcccgccccggccgcaccgagcgtcgggatccgaggtgggagcgtacccctccccgctccccggacgcctcagtcctccgcactgagcttggccacgcgcccctaggcgccccccacgccctgggccccggagggccgcagccatgagtgaaatgtccagctttcttcacatcggggacatcgtctccctgtacgccgagggctccgtcaatggcttcatcagcactttggggctggtggatgaccgctgtgtggtggagcccgcggccggggacctggacaacccccctaagaagttccgtgactgcctcttcaaggtgtgccccatgaaccgctactcggcccagaagcagtactggaaggccaagcagactaagcaggacaaggagaagatcgctgatgtggtgttgctgcagaagctgcagcatgcggcgcagatggagcagaagcaaaatgacacggagaacaagaaggtgcatggggatgtcgtgaagtatggcagtgtgatccagctcctgcacatgaagagcaacaagtacctgacagtgaacaagcggcttccggccttgctggagaagaacgccatgcgggtgactctggatgccacaggcaacgagggttcctggctcttcatccagcccttctggaagctgcggagcaacggggacaacgtggtcgtgggggacaaggtgatcctgaatcctgtcaatgccgggcagcctctgcatgccagcaattacgagctcagcgacaacgccggctgcaaggaggtcaattctgtgaactgcaacaccagctggaagatcaacctgtttatgcagtttcgggaccacctggaggaggtgttgaaagggggagacgtggtgcggctgttccatgcggagcaggagaagttcctgacgtgtgacgagtacaagggcaagctgcaggtgttcctgcgaactacactgcgccagtctgccacctcggccaccagctccaatgctctctgggaggtggaggtggtccaccacgacccctgccgtggaggagctgggcactggaatggcttgtaccgcttcaagcacctggctacaggcaactacctggctgctgaggagaaccccagttacaaaggtgatgcctcagatcccaaggcagcaggaatgggggcacagggccgcacaggccgcaggaatgctggggagaagatcaagtactgcctggtggctgtgcctcatggcaatgacatcgcctctctctttgagctggaccccaccaccttgcagaaaaccgactctttcgtgccccggaactcgtacgtccggctgcggcacctctgcaccaacacgtggattcagagcaccaatgtgcccattgacatcgaggaggagcggcccatccggctcatgctgggcacctgccccaccaaggaggacaaggaggcctttgccatcgtgtcagtgcccgtgtctgagatccgagacctggactttgccaatgacgccagctccatgctggccagtgccgtggagaaactcaacgagggcttcatcagccagaatgaccgcaggtttgtcatccagctgctggaagacctggtgttctttgtcagcgatgtccccaacaatgggcagaatgtcctggacatcatggtcactaagcccaaccgggaacggcagaagctgatgagggagcagaacatcctcaaacaggtctttggcattctgaaggccccgttccgtgagaaggggggtgaaggtcccctggtgcggctggaggagctgtcagaccagaagaacgccccctaccagcacatgttccgcctgtgctaccgcgtgttgcggcattcccaggaggactaccgcaagaaccaggagcacattgccaagcagtttgggatgatgcagtcccagattggctacgacatcctggccgaggacaccatcactgccctgctgcacaacaaccgcaagctcctggaaaagcacatcaccaagaccgaggtggagaccttcgtcagccttgtgcgcaagaaccgggagcccaggttcctggactacctctctgacctgtgtgtgtccaaccacatcgccatccccgtcacccaagagctcatctgcaagtgtgtgctggaccccaagaacagtgacattctcatccggaccgagcttcggcccgtgaaggagatggcccaatcccacgagtacctgagcatcgagtactcagaagaggaagtgtggctcacgtggactgacaagaataacgagcatcatgagaagagtgtgaggcagctggcccaggaggcgcgggccggcaacgcccacgacgagaatgtgctcagctactacaggtaccagctgaagctctttgcccgcatgtgcttggaccgccagtacttggccatcgacgagatctcccagcagctgggcgtggacctgattttcctgtgcatggcagacgagatgctgccctttgacctgcgcgcctccttctgccacctgatgctgcacgtgcacgtggaccgtgacccccaggagctggtcacgccggtcaagtttgcccgtctctggactgagatccccacagccatcaccatcaaggactatgattccaacctcaacgcgtcccgagatgacaagaagaacaagtttgccaacaccatggagttcgtggaggactacctcaacaatgtagtcagcgaggccgtgccctttgccaacgaggagaagaacaagctcacttttgaggtggtcagcctggcgcacaatctcatctacttcggcttctacagcttcagcgagctgctgcggctcactcgcacactgctgggcatcatcgactgtgtgcaggggcccccggccatgctgcaggcctatgaggaccccggtggcaagaatgtgcggcggtccatccagggcgtggggcacatgatgtccaccatggtgctgagccgcaagcagtccgtcttcagtgcccccagcctgtctgctggggccagtgctgctgagccgctggacagaagcaagtttgaggagaatgaggacattgtggtgatggagaccaagctgaagatcctggaaatccttcagttcatcctcaatgtccgcctggattaccgcatatcctacctgctgtctgtcttcaagaaggagtttgtggaggtgtttcccatgcaggacagtggggctgatggcacagcccctgccttcgactctaccactgccaacatgaacctggatcgcatcggggagcaggcggaggccatgtttggagtggggaagacaagcagcatgctggaggtggatgacgagggcggccgcatgttcctgcgcgtgctcatccacctcaccatgcacgactatgcgccgctggtctcgggtgccctgcagctgctcttcaagcacttcagccagcgccaggaggccatgcacaccttcaagcaggttcagctgctgatctcagcgcaggacgtggagaactacaaggtgatcaagtcggagctggaccggctgcggaccatggtggagaagtcagagctgtgggtggacaagaagggcagtggcaagggtgaggaggtggaggcaggcgccgccaaggacaagaaagagcgtcccacggacgaggagggctttctgcacccaccaggggagaaaagcagtgagaactaccagatcgtcaagggcatcctggaaaggctgaacaagatgtgcggggttggggagcaaatgaggaagaagcagcaacggctgctgaagaacatggatgcccacaaggtcatgctggacctgctgcagatcccctatgacaagggtgatgccaagatgatggagatcctgcgctacacgcaccagttcctgcagaagttctgtgcagggaaccccggcaaccaggccctgctgcacaaacacctgcacctcttcctcacgccagggctcctggaggcagagaccatgcagcacatcttcctgaacaactatcagctctgctccgagatcagcgagcctgtgttgcagcacttcgtgcacctgctggccacgcacgggcgccatgtgcagtacctggacttcctgcacaccgtcattaaggccgagggcaagtacgtcaagaagtgccaggacatgatcatgactgagctgaccaatgcaggtgacgatgtggtcgtgttctacaatgataaggcatcgctggcccacctgctggacatgatgaaggccgcccgcgacggcgtggaggaccacagccccctcatgtaccacatttccctggtggacctgctggccgcctgtgccgagggcaaaaacgtctacactgagatcaagtgcacctccctgctgccgctggaggacgtggtgtctgtggtgacgcatgaggactgcatcactgaggtgaaaatggcctatgtgaacttcgtgaaccactgctacgtggacacggaggtggagatgaaggagatctacaccagcaaccacatctggacgctctttgagaacttcaccctggacatggctcgggtctgcagcaagcgtgagaagcgcgtggctgaccccaccttggagaagtacgtgctgagcgttgtgctggacaccatcaacgccttcttcagctccccattctctgagaacagcacttccctgcagacacaccagacgattgtggtgcagctgctgcagtctaccacacgcctcctcgagtgtccgtggctacagcagcagcacaagggctccgtggaggcctgcatccggaccctcgccatggtggccaagggccgggccatcttgctgcccatggacctggatgcccacatcagctcgatgctcagcagtggagccagctgtgcagctgccgcccagcggaacgcctccagctacaaggcaaccacgcgggccttcccccgcgtcacccccaccgccaaccagtgggactacaagaacatcattgagaagctgcaggacatcatcacagccctggaggagcggctgaagcccctggtacaggctgagctgtccgtgctggtggatgtcctgcactggcctgagctgctcttcctggagggcagtgaggcctaccagcgctgcgagagtgggggcttcctgtccaagctgatccagcacaccaaggacctcatggagtcggaggagaagctgtgcatcaaggtgctgcggaccctgcagcagatgctgctcaagaagaccaagtacggggaccggggcaaccagctgcgcaagatgctgctgcaaaactacctccagaaccggaagtccacctcgcggggggaccttcccgaccccataggcactggcctggacccagactggtcggcaatcgcagccacccagtgccggctggacaaggagggggccaccaagttggtatgcgacctcatcaccagcaccaagaacgagaagatcttccaggagagcatcggcctggccatccacctgctggatggtggcaacacagagatccagaaatccttccacaacctgatgatgagtgacaagaagtcagagcgcttcttcaaggtgctgcacgaccgcatgaagcgggcccagcaggagaccaagtccacggtggcagtcaacatgaatgacctgggcagccagccacatgaggaccgcgagccagtcgaccccaccaccaaaggccgcgtggcctccttctcgatacctggctcctcatcccgctactcgctgggccccagcctgcgccgggggcacgaggtgagcgaacgtgtgcagagcagtgagatgggcacatccgtgctcatcatgcagcccatcctgcgctttctgcagctgctgtgtgagaaccacaaccgggacctgcagaacttcctgcgctgtcagaacaacaaaaccaactacaacttggtatgcgagacgctgcagttcctggacatcatgtgcggcagcaccacgggcggcctggggctgctggggctctacatcaatgaggacaacgtgggcctcgtcatccagaccttggagaccctcactgagtactgccagggcccctgccatgagaaccagacttgcattgtgactcacgagtccaatggcatagacatcatcaccgcactgatcctcaatgacatcagccccctgtgcaagtaccgcatggatctggtgctgcagctcaaggacaatgcctccaagctgctcctggctctgatggagagccggcatgacagtgaaaatgctgagcgaatcctcatcagcctgcggccccaggagctggtggacgtcatcaagaaggcctacctgcaggaggaagagcgtgagaactcggaggtgagcccacgtgaagtgggccataacatctatatcctggcgctgcagctctccaggcacaataaacagctgcagcacctgctgaagccggtgaagcgcattcaagaggaggaggccgagggtatctcttccatgctcagcctcaacaacaagcagctgtcacagatgctcaagtcctcagcgccagcacaggaggaggaggaagaccccctggcctactatgagaaccacacgtcccagatcgagattgtgcggcaggaccgcagcatggagcagatcgtgttcccagtgcccggcatctgccagttcctgacggaggaaaccaagcaccggctcttcaccactactgagcaggacgagcagggcagcaaagtgagcgacttcttcgaccagtcctccttcctgcacaacgagatggagtggcagcgcaagctccgcagcatgccgctgatctactggttctcccgccgcatgaccctgtggggcagcatctccttcaacctggccgtgtttatcaacatcatcattgccttcttctacccttacatggagggcgcgtccacaggcgtgctggactcccctctcatctcattgctcttctggatcctcatctgcttctccatcgcggccctgttcaccaagcgctacagcatccgccccctcatcgtggcgctcatcctgcgctccatctactatctgggcatcgggcccacactcaacatcctgggtgccctcaatctgaccaacaagatcgtgtttgtggtgagcttcgtgggcaaccgtggcaccttcatccggggctataaggccatggtcatggacatggaattcctctaccacgtgggctacatcctgaccagtgtcctgggcctctttgctcatgagctgttctacagcatcctgctctttgacctcatctaccgcgaggagacgctgttcaacgtcatcaagagtgtgacccgcaatggccgctccatcctgctgacagccctgctggccctcatcctggtctacctcttctccatcgtcggcttcctcttcctcaaggatgacttcattctcgaggtcgaccggctgcccaacaaccactccacagccagccccctggggatgccacatggagctgctgcatttgtggacacctgcagtggggacaagatggactgtgtctcagggctctcggtgcctgaggtcctggaagaggacagggagctggacagcacagagcgggcctgtgacactctgttgatgtgcatcgtcactgtcatgaaccatgggctacgcaacggtggtggcgtgggcgacattctccgcaagccctccaaagatgagtctctcttcccagcccgagtggtctatgacctcctgttcttcttcatcgtcatcatcattgtgctgaacctcatctttggggtaatcatcgacaccttcgctgacctgcgtagtgagaagcagaagaaggaggagattcttaagacgacatgcttcatctgtggtctggagagggacaagtttgataacaagacagtgtcatttgaggaacacatcaagctggagcacaacatgtggaactacttgtacttcattgtgctggtccgcgtgaagaacaagaccgactacacgggccctgagagctacgtggcccagatgatcaagaacaagaacctggactggttcccccggatgcgggccatgtcccttgtcagcaatgagggcgagggggagcagaatgagattcggattctccaggacaagctcaactccaccatgaagctggtgtcccacctcactgcccagctcaacgagctcaaggagcagatgacggagcagcggaaacgcaggcaacgcctaggctttgtggatgtccagaactgcattagccgctgaggagagccaccgaaggccccaacaggggatgctcatcactggagactgcgactgggaagaacactgccccctccctcgggttgggtggcccagccagctggccagcctccactcccactctgccagacaccctgacacccacccaggctttgaagagcatggagggggagcctcagagctgacagtcctgcttagagcccttaaaaagacttgaaagttcactgggactcagtttaccttaatgccttagcagaagataaatcctacctagagacctttgttccttaaagcaataactgacaactctttgtagtcctccttgtgggtagttaagagtggggtcacccctttaactccaagcactacattttggcggctgccggcctctgggggaggtggcagttatgctgttactagtgattttagggctttgttatttaacttatttcaagggtgctgtgctcagccctgcccatggctgtgcagctccctccgtgcctcagatctgctgtagccagtgcagacctcactgtcgtgtccatgccacccccggcatggctccaggtggcctggtgactccatgatggacgatcttgctcccaggacctgcctcttcccaggcttcctggggaagagttgtacgcccaggcaacaagggctgagctgcgcttgcgtggctgtttcatgaccgcttgtttttctccttttggtgtaatgttttacaaatcctttggcctgagaactaatatgttaattgccttaaataaattaatagaaatctagtccgttaaaaaaaaaaaaaaaaaa

SEQ ID NO: 42 - DNA, 1901 bp, Homo sapiens
gggcaggaagacggcgctgcccggaggagcggggcgggcgggcgcgcgggggagcgggcggcgggcgggagccaggcccgggcgggggcgggggcggcggggccagaagaggcggcgggccgcgctccggccggtctgcggcgttggccttggctttggctttggcggcggcggtggagaagatgctgcagtccctggccggcagctcgtgcgtgcgcctggtggagcggcaccgctcggcctggtgcttcggcttcctggtgctgggctacttgctctacctggtcttcggcgcagtggtcttctcctcggtggagctgccctatgaggacctgctgcgccaggagctgcgcaagctgaagcgacgcttcttggaggagcacgagtgcctgtctgagcagcagctggagcagttcctgggccgggtgctggaggccagcaactacggcgtgtcggtgctcagcaacgcctcgggcaactggaactgggacttcacctccgcgctcttcttcgccagcaccgtgctctccaccacaggttatggccacaccgtgcccttgtcagatggaggtaaggccttctgcatcatctactccgtcattggcattcccttcaccctcctgttcctgacggctgtggtccagcgcatcaccgtgcacgtcacccgcaggccggtcctctacttccacatccgctggggcttctccaagcaggtggtggccatcgtccatgccgtgctccttgggtttgtcactgtgtcctgcttcttcttcatcccggccgctgtcttctcagtcctggaggatgactggaacttcctggaatccttttatttttgttttatttccctgagcaccattggcctgggggattatgtgcctggggaaggctacaatcaaaaattcagagagctctataagattgggatcacgtgttacctgctacttggccttattgccatgttggtagttctggaaaccttctgtgaactccatgagctgaaaaaattcagaaaaatgttctatgtgaagaaggacaaggacgaggatcaggtgcacatcatagagcatgaccaactgtccttctcctcgatcacagaccaggcagctggcatgaaagaggaccagaagcaaaatgagccttttgtggccacccagtcatctgcctgcgtggatggccctgcaaaccattgagcgtaggatttgttgcattatgctagagcaccagggtcagggtgcaaggaagaggcttaagtatgttcatttttatcagaatgcaaaagcgaaaattatgtcactttaagaaatagctactgtttgcaatgtcttattaaaaaacaacaaaaaaagacacatggaacaaagaagctgtgaccccagcaggatgtctaatatgtgaggaaatgagatgtccacctaaaattcatatgtgacaaaattatctcgaccttacataggaggagaatacttgaagcagtatgctgctgtggttagaagcagattttatacttttaactggaaactttggggtttgcatttagatcatttagctgatggctaaatagcaaaatttatatttagaagcaaaaaaaaaaagcatagagatgtgttttataaataggtttatgtgtactggtttgcatgtacccacccaaaatgattatttttggagaatctaagtcaaactcactatttataatgcataggtaaccattaactatgtacatataaagtataaatatgtttatattctgtacatatggtttaggtcaccagatcctagtgtagttctgaaactaagactatagatattttgtttcttttgatttctctttatactaaagaatccagagttgctacaataaaataaggggaataataaacttgagagtgaataaccat

SEQ ID NO: 43 - DNA, 2240 bp, Homo sapiens
gtccttcggtgtctgggtgtggtgagtagaggtgtgtgtcacaaagtacagaccattgtgtgtgacaaagcccatcgtgtgtctgtgtgtgtctttatccacgtggatggacgtctctttcttgctctgccccaagacacaccctagcccctccttattctcaaaagggggagctggggagcctccccctaccctggggcctcccctgcccctccccgccctgcctggccgtcaccactccccagagggcacagggctctgctgtgcctcagagcaaaagtcccagagccagcagagcaggctgacgacctgcaagccacagtggctgccctgtgcgtgctgcgaggtgggggaccctgggcaggaagctggctgagccccaagaccccgggggccatgggcggggatctggtgcttggcctgggggccttgagacgccgaaagcgcttgctggagcaggagaagtctctggccggctgggcactggtgctggcaggaactggcattggactcatggtgctgcatgcagagatgctgtggttcggggggtgctcgtgggcgctctacctgttcctggttaaatgcacgatcagcatttccaccttcttactcctctgcctcatcgtggcctttcatgccaaagaggtccagctgttcatgaccgacaacgggctgcgggactggcgcgtggcgctgaccgggcggcaggcggcgcagatcgtgctggagctggtggtgtgtgggctgcacccggcgcccgtgcggggcccgccgtgcgtgcaggatttaggggcgccgctgacctccccgcagccctggccgggattcctgggccaaggggaagcgctgctgtccctggccatgctgctgcgtctctacctggtgccccgcgccgtgctcctgcgcagcggcgtcctgctcaacgcttcctaccgcagcatcggcgctctcaatcaagtccgcttccgccactggttcgtggccaagctttacatgaacacgcaccctggccgcctgctgctcggcctcacgcttggcctctggctgaccaccgcctgggtgctgtccgtggccgagaggcaggctgttaatgccactgggcacctttcagacacactttggctgatccccatcacattcctgaccatcggctatggtgacgtggtgccgggcaccatgtggggcaagatcgtctgcctgtgcactggagtcatgggtgtctgctgcacagccctgctggtggccgtggtggcccggaagctggagtttaacaaggcagagaagcacgtgcacaacttcatgatggatatccagtataccaaagagatgaaggagtccgctgcccgagtgctacaagaagcctggatgttctacaaacatactcgcaggaaggagtctcatgctgcccgcaggcatcagcgcaagctgctggccgccatcaacgcgttccgccaggtgcggctgaaacaccggaagctccgggaacaagtgaactccatggtggacatctccaagatgcacatgatcctgtatgacctgcagcagaatctgagcagctcacaccgggccctggagaaacagattgacacgctggcggggaagctggatgccctgactgagctgcttagcactgccctggggccgaggcagcttccagaacccagccagcagtccaagtagctggacccacgaggaggaaccaggctactttccccagtactgaggtggtggacatcgtctctgccactcctgacccagccctgaacaaagcacctcaagtgcaaggaccaaagggggccctggcttggagtgggttggcttgctgatggctgctggaggggacgctggctaaagtgggtaggccttggcccacctgaggccccaggtgggaacatggtcacccccactctgcataccctcatcaaaaacactctcactatgctgctatggacgacctccagctctcagttacaagtgcaggcgactggaggcaggactcctgggtccctgggaaagagggtactaggggcccggatccaggattctgggaggcttcagttaccgctggccgagctgaagaactgggtatgaggctggggcggggctggaggtggcgccccctggtgggacaacaaagaggacaccatttttccagagctgcagagagcacctggtggggaggaagaagtgtaactcaccagcctctgctcttatctttgtaataaatgttaaagccagaa

SEQ ID NO: 44 - DNA, 3350 bp, Homo sapiens
tagtcgcggggcaggtacgtgcgctcgcggttctctcgcggaggtcggcggtggcgggagcgggctccggagagcctgagagcacggtggggcggggcgggagaaagtggccgcccggaggacgttggcgtttacgtgtggaagagcggaagagttttgcttttcgtgcgcgccttcgaaaactgcctgccgctgtctgaggagtccacccgaaacctcccctcctccgccggcagccccgcgctgagctcgccgacccaagccagcgtgggcgaggtgggaagtgcgcccgacccgcgcctggagctgcgcccccgagtgcccatggctacaagggtgctgagcatgagcgcccgcctgggacccgtgccccagccgccggcgccgcaggacgagccggtgttcgcgcagctcaagccggtgctgggcgccgcgaatccggcccgcgacgcggcgctcttccccggcgaggagctgaagcacgcgcaccaccgcccgcaggcgcagcccgcgcccgcgcaggccccgcagccggcccagccgcccgccaccggcccgcggctgcctccagaggacctggtccagacaagatgtgaaatggagaagtatctgacacctcagcttcctccagttcctataattccagagcataaaaagtatagacgagacagtgcctcagtcgtagaccagttcttcactgacactgaagggttaccttacagtatcaacatgaacgtcttcctccctgacatcactcacctgagaactggcctctacaaatcccagagaccgtgcgtaacacacatcaagacagaacctgttgccattttcagccaccagagtgaaacgactgcccctcctccggccccgacccaggccctccctgagttcaccagtatattcagctcacaccagaccgcagctccagaggtgaacaatattttcatcaaacaagaacttcctacaccagatcttcatctttctgtccctacccagcagggccacctgtaccagctactgaatacaccggatctagatatgcccagttctacaaatcagacagcagcaatggacactcttaatgtttctatgtcagctgccatggcaggccttaacacacacacctctgctgttccgcagactgcagtgaaacaattccagggcatgcccccttgcacatacacaatgccaagtcagtttcttccacaacaggccacttactttcccccgtcaccaccaagctcagagcctggaagtccagatagacaagcagagatgctccagaatttaaccccacctccatcctatgctgctacaattgcttctaaactggcaattcacaatccaaatttacccaccaccctgccagttaactcacaaaacatccaacctgtcagatacaatagaaggagtaaccccgatttggagaaacgacgcatccactactgcgattaccctggttgcacaaaagtttataccaagtcttctcatttaaaagctcacctgaggactcacactggtgaaaagccatacaagtgtacctgggaaggctgcgactggaggttcgcgcgatcggatgagctgacccgccactaccggaagcacacaggcgccaagcccttccagtgcggggtgtgcaaccgcagcttctcgcgctctgaccacctggccctgcatatgaagaggcaccagaactgagcactgcccgtgtgacccgttccaggtcccctgggctccctcaaatgacagacctaactattcctgtgtaaaaacaacaaaaacaaacaaaagcaagaaaaccacaactaaaactggaaatgtatattttgtatatttgagaaaacagggaatacattgtattaataccaaagtgtttggtcattttaagaatctggaatgcttgctgtaatgtatatggctttactcaagcagatctcatctcatgacaggcagccacgtctcaacatgggtaaggggtgggggtggaggggagtgtgtgcagcgtttttacctaggcaccatcatttaatgtgacagtgttcagtaaacaaatcagttggcaggcaccagaagaagaatggattgtatgtcaagattttacttggcattgagtagtttttttcaatagtaggtaattccttagagatacagtatacctggcaattcacaaatagccattgaacaaatgtgtgggtttttaaaaattatatacatatatgagttgcctatatttgctattcaaaattttgtaaatatgcaaatcagctttataggtttattacaagttttttaggattcttttggggaagagtcataattcttttgaaaataaccatgaatacacttacagttaggatttgtggtaaggtacctctcaacattaccaaaatcatttctttagagggaaggaataatcattcaaatgaactttaaaaaagcaaatttcatgcactgattaaaataggattattttaaatacaaaaggcattttatatgaattataaactgaagagcttaaagatagttacaaaatacaaaagttcaacctcttacaataagctaaacgcaatgtcatttttaaaaagaaggacttagggtgtcgttttcacatatgacaatgttgcatttatgatgcagtttcaagtaccaaaacgttgaattgatgatgcagttttcatatatcgagatgttcgctcgtgcagtactgttggttaaatgacaatttatgtggattttgcatgtaatacacagtgagacacagtaattttatctaaattacagtgcagtttagttaatctattaatactgactcagtgtctgcctttaaatataaatgatatgttgaaaacttaaggaagcaaatgctacatatatgcaatataaaatagtaatgtgatgctgatgctgttaaccaaagggcagaataaataagcaaaatgccaaaaggggtcttaattgaaatgaaaatttaattttgtttttaaaatattgtttatctttatttattttgtggtaatatagtaagtttttttagaagacaattttcataacttgataaattatagttttgtttgttagaaaagttgctcttaaaagatgtaaatagatgacaaacgatgtaaataattttgtaagaggcttcaaaatgtttatacgtggaaacacacctacatgaaaagcagaaatcggttgctgttttgcttctttttccctcttatttttgtattgtggtcatttcctatgcaaataatggagcaaacagctgtatagttgtagaattttttgagagaatgagatgtttatatattaacgacaattttttttttggaaaataaaaagtgcctaaaaga

SEQ ID NO: 45 - DNA, 1598 bp, Homo sapiens
gggggaggctggcagcggagctttgaatagggaagttttgcaggggttacgtttgcagtcagtccggtgtttgcaaatattgtgtgggctccgcgcgctgcgggctgcgggagggtccggccgggcgtctctgcgagcctggagtttgcatgaaactttcacctgcgctccggggagactttcggctccggctcccaccgcgcgcctcgccgccctcgcgaccgcgggctccgtccaacccggcccgacatggacgtgctccccatgtgcagcatcttccaggagctccagatcgtgcacgagaccggctacttctcggcgctgccgtctctggaggagtactggcaacagacctgcctagagctggaacgttacctccagagcgagccctgctatgtttcagcctcagaaatcaaatttgacagccaggaagatctgtggaccaaaatcattctggctcgggagaaaaaggaggaatccgaactgaagatatcttccagtcctccagaggacactctcatcagcccgagcttttgttacaacttagagaccaacagcctgaactcagatgtcagcagcgaatcctctgacagctccgaggaactttctcccacggccaagtttacctccgaccccattggcgaagttttggtcagctcgggaaaattgagctcctctgtcacctccacgcctccatcttctccggaactgagcagggaaccttctcaactgtggggttgcgtgcccggggagctgccctcgccagggaaggtgcgcagcgggacttcggggaagccaggtgacaagggaaatggcgatgcctcccccgacggcaggaggagggtgcaccggtgccactttaacggctgcaggaaagtttacaccaaaagctcccacttgaaagcacaccagcggacgcacacaggagaaaagccttacagatgctcatgggaagggtgtgagtggcgttttgcaagaagtgatgagttaaccaggcacttccgaaagcacaccggggccaagccttttaaatgctcccactgtgacaggtgtttttccaggtctgaccacctggccctgcacatgaagaggcacctctgagggagcagagaggtggatcctgtaggctaaaaggcttccaggctgagagccggccgtggaaggagggatgcgtgttccagccaaagcatgccgttctgcaccctacccagttgcctccagggcctctccttggaaggtcttttgagggctaaaaaggtcctgtaagaagcggcatagcacccgtggtgcatggtatgtgggtgaccctggactcgccactggtacccgcccttccgagcggcgcctaagcctttgccgtgagcatgcacactgagaatgctaatggttgggttgattgtatgttgaggatctattactgaccgtatgatgaggccaactttttttccttgtggttagcaagactgcaagagatggaaaaaaagtagtttgaatgttttgtgtgtaaggagtataccatgagatgagatgaccaccaatcatttccttggggggagggggtgtctgcaccttagaaaaaaaaagaaaaatcaaaaaaa

SEQ ID NO: 46 - DNA, 10511 bp, Homo sapiens
gcaggtccgggaggcgcaggcggagagcggcggtgcccccgagcccctctgcggacggctcaggcgggaggaccccgcgcggctggatggcggcggccgcgcggcctcggggtcgggcactggggccagtactgccgccgacgccgctgctcctgctggtactgcgggtgctgccagcctgcggggcgaccgctcgggatcccggggccgcggccgggctcagccttcacccgacttacttcaacctggccgaggcggcgaggatttgggccaccgccacctgcggggagaggggacccggcgaggggaggccccagcccgagctctactgcaagttggtcgggggccccaccgccccaggcagcggccacaccatccagggccagttctgtgactattgcaattctgaagaccccaggaaagcacatcctgtcaccaatgccatcgatggatctgaacgttggtggcaaagccctcccctgtcctcaggcacacagtacaacagagtcaacctcaccttggatctggggcagctcttccatgtggcctatattttaatcaaatttgcaaattctcctcgccctgatctttgggtcttggaaagatctgtagactttggaagcacctactcaccatggcaatattttgctcattctaaagtagactgtttaaaagaatttgggcgggaggcaaatatggctgtcacccgggatgatgatgtactttgtgttactgaatattcccgtattgtacctttggaaaatggtgaggttgtggtgtccttgataaacggtcgtccaggtgcaaaaaattttactttctctcacaccctgagggagtttaccaaggcaacaaacatccgcttgcgttttcttagaaccaatacgcttcttggacacctcatctccaaagcccagcgagatccaactgtcactcggcggtattattacagcataaaggacatcagcattggtgggcagtgtgtttgcaatggccatgctgaagtgtgcaatataaacaatcctgaaaaactgtttcggtgtgaatgccagcaccacacctgtggggagacgtgtgatcgctgctgcacagggtacaatcagaggcgctggcggcccgccgcttgggagcagagccacgagtgtgaagcatgcaactgccacggccatgccagcaactgttactatgatccagatgttgagcggcagcaggcaagcttgaatacccagggcatctatgctggtggaggggtctgcattaactgtcagcacaacacagctggagtaaactgtgaacagtgtgctaagggctattaccgcccttatggggttccagtggatgcccctgatggctgcatcccctgcagctgtgaccctgagcatgcggatggctgtgaacagggttcaggccgctgtcactgcaagccaaatttccacggagacaactgtgagaagtgtgcaattggatactacaatttcccattttgcttgagaattcccatttttcctgtttctacaccaagttcagaagatccagtagctggagatataaaagggtgtgactgtaatctggaaggtgttctccctgaaatatgtgatgcccacggacggtgcctgtgccgccctggggttgagggccctcgatgtgatacctgccgctctggtttctactcattccctatttgccaagcctgctggtgttcagcccttggatcctaccagatgccctgcagctcagtgactggacagtgtgaatgtcggccaggagttacaggacagcggtgtgacaggtgtctctcaggagcttatgatttcccccactgccaaggttccagcagtgcttgtgacccagctggtaccatcaactccaatttggggtattgccaatgcaagcttcatgttgaaggtcctacttgtagccgctgcaaactgttatattggaatctggacaaagaaaaccccagtggatgttcagaatgcaagtgccataaggcgggaacagtgagtggaactggagagtgtaggcagggagatggtgactgtcactgcaagtcccatgtgggtggcgattcctgcgacacctgtgaagatggatattttgctttggaaaagagcaattactttgggtgtcaagggtgtcagtgtgacattggtggggcattgtcctccatgtgcagtgggccctcgggagtgtgccagtgccgagagcatgtcgtgggaaaggtgtgccagcggcctgaaaacaactactatttcccagatttgcatcatatgaagtatgagattgaagacggcagcacacctaatgggagagaccttcgatttggatttgatccgctggcatttcctgagtttagctggagaggatatgcccaaatgacctcagtacagaatgatgtaagaataacattgaatgtagggaagtcaagtggctccttgtttcgtgttattctgagatacgttaaccctggaactgaagcagtatctggccatataactatttatccatcctggggtgctgctcaaagcaaagagatcatcttcctgccgagtaaggagccagcctttgtcactgtccctggaaatggttttgcagacccattttcaatcacaccaggaatatgggttgcttgtattaaggcagaaggagtccttctggattacctggtgctgctccccagggactactatgaagcctctgtactgcagctgccagtcacagaaccatgtgcctacgcaggacctccccaagaaaattgcttactctaccagcatttgccagtgaccagattcccctgtaccctggcttgtgaggccagacacttcctgcttgatggggagccaagacccgtggcagtgaggcagcccacacctgcacaccctgtcatggtggacctcagcgggagagaggtggaattgcatctgcggctgcgcatcccacaggttggccactacgtggttgtggtcgagtattccacggaggcagctcagctgtttgtggttgatgtgaatgtgaagagctccgggtctgttctggcaggccaggtgaacatttacagctgcaactacagtgttctctgccggagtgctgtgattgatcacatgagccgcatcgccatgtatgagctattggcagatgcagacattcagctcaagggacacatggcccgattccttctgcatcaagtttgtatcatacctattgaagaattctcagctgagtatgtgagaccacaagtccactgcattgccagttatgggcgatttgtcaatcaaagtgccacctgtgtctccttggcccatgaaactcctccaacagcattaattttggatgttctaagtggcaggcctttccctcacctgccccagcagtcgtcaccttctgttgatgttcttcctggggtcaccttgaaggcaccgcagaatcaagtgaccctgagaggacgtgtaccacacctgggccgatacgtctttgtcatccatttttaccaagcagcgcacccgacgtttcccgcgcaggtgtcggtggatggcgggtggccacgggcaggctccttccatgcctctttttgcccccatgtgcttggctgccgggatcaagtgattgccgaaggccagattgagtttgacatctcagagcctgaagtggccgcaactgtgaaggttccagaaggaaagtccttggttttggtccgtgttctagtggtgcctgcagaaaactatgactaccaaatacttcacaaaaaatccatggacaagtcactcgagtttatcaccaattgtggaaaaaacagcttttaccttgacccccagacagcctccagattctgtaagaattccgccaggtccctggtggccttttaccacaagggcgccctgccttgtgagtgccaccccactggggccaccggccctcactgcagccctgagggtgggcagtgcccatgccagcccaacgtcatcgggcggcagtgcacccgctgtgcaacaggccactacggattcccacgctgcaagccgtgcagctgtggtcggcgcctttgtgaagagatgacggggcagtgccgctgccctccccgcacggtcaggccccagtgtgaggtgtgtgagacacactcattcagcttccaccccatggccggctgcgaaggctgcaactgttccaggaggggcaccatcgaggctgccatgccggagtgtgaccgggacagcgggcagtgcagatgcaagcccagaatcacagggcggcagtgtgaccgatgtgcttccgggttttaccgctttcctgagtgtgttccctgcaattgcaacagagatgggactgagccaggagtgtgtgacccagggaccggggcttgcctctgcaaggaaaatgtagaaggcacagagtgtaatgtgtgtcgagaaggctcattccatttggacccagccaatctcaagggttgtaccagctgtttctgttttggagtaaataatcaatgtcacagctcacataagcgaaggactaagtttgtggatatgctgggctggcacctggagacagcagacagagtggacatccctgtctctttcaacccaggcagcaacagtatggtggcggatctccaggagctgcccgcaaccatccacagcgcgtcctgggtcgcacccacctcctacctgggggacaaggtttcttcatatggtggttacctcacttaccaagccaagtcctttggcttgcctggcgacatggttcttctggaaaagaagccggatgtacagctcactggtcagcacatgtccatcatctatgaggagacaaacaccccacggccagaccggctgcatcatggacgagtgcacgtggtcgagggaaacttcagacatgccagcagccgtgccccagtgtctagggaggagctgatgacagtgctgtctagactggcagatgtgcgcatccaaggcctctacttcacagagactcaaaggctcaccctgagcgaggtggggctagaggaagcctctgacacaggaagtgggcgcatagcacttgctgtggaaatctgtgcctgcccccctgcctacgctggtgactcttgtcagggttgtagccctggatactatcgggatcataaaggcttgtataccggacggtgtgttccctgcaattgcaacggacattcaaatcaatgccaggatggctcaggcatatgtgttaactgtcagcacaacaccgcgggagagcactgtgaacgctgccaggagggctactatggcaacgccgtccacggatcctgcagggcctgcccatgtcctcacactaacagctttgccactggctgtgtggtgaatgggggagacgtgcggtgctcctgcaaagctgggtacacaggaacacagtgtgaaaggtgtgcaccgggatatttcgggaatccccagaaattcggaggtagctgccaaccatgcagttgtaacagcaatggccagctgggcagctgtcatcccctgactggagactgcataaaccaagaacccaaagatagcagccctgcagaagaatgtgatgattgcgacagctgtgtgatgaccctcctgaacgacctggccaccatgggcgagcagctccgcctggtcaagtctcagctgcagggcctgagtgccagcgcagggcttctggagcagatgaggcacatggagacccaggccaaggacctgaggaatcagttgctcaactaccgttctgccatttcaaatcatggatcaaaaatagaaggcctggaaagagaactgactgatttgaatcaagaatttgagactttgcaagaaaaggctcaagtaaattccagaaaagcacaaacattaaacaacaatgttaatcgggcaacacaaagcgcaaaagaactggatgtgaagattaaaaatgtcatccggaatgtgcacattcttttaaagcagatctctgggacagatggagagggaaacaacgtgccttcaggtgacttttccagagagtgggctgaagcccagcgcatgatgagggaactgcggaacaggaactttggaaagcacctcagagaagcagaagctgataaaagggagtcgcagctcttgctgaaccggataaggacctggcagaaaacccaccagggggagaacaatgggcttgctaacagtatccgggattctttaaatgaatacgaagccaaactcagtgaccttcgtgctcggctgcaggaggcagctgcccaagccaagcaggcaaatggcttgaaccaagaaaacgagagagctttgggagccattcagagacaagtgaaagaaataaattccctgcagagtgatttcaccaagtatctaaccactgcagactcatctttgttgcaaaccaacattgcgctgcagctgatggagaaaagccagaaggaatatgaaaaattagctgccagtttaaatgaagcaagacaagaactaagtgacaaagtaagagaactttccagatctgctggcaaaacatcccttgtggaggaggcagaaaagcacgcgcggtccttacaagagctggcaaagcagctggaagagatcaagagaaacgccagcggggatgagctggtgcgctgtgctgtggatgccgccaccgcctacgagaacatcctcaatgccatcaaagcggccgaggacgcagccaacagggctgccagtgcatctgaatctgccctccagacagtgataaaggaagatctgccaagaaaagctaaaaccctgagttccaacagtgataaactgttaaatgaagccaagatgacacaaaagaagctaaagcaagaagtcagtccagctctcaacaacctacagcaaaccctgaatattgtgacagttcagaaagaagtgatagacaccaatctcacaactctccgagatggtcttcatgggatacagagaggtgatattgatgctatgatcagtagtgcaaagagcatggtcagaaaggccaacgacatcacagatgaggttctggatgggctcaaccccatccagacagatgtggaaagaattaaggacacctatgggaggacacagaacgaagacttcaaaaaggctctgactgatgcagataactcggtgaataagttaaccaacaaactacctgatctttggcgcaagattgaaagtatcaaccaacagctgttgcccttgggaaacatctctgacaacatggacagaatacgagaactaattcagcaggccagagatgctgccagtaaggttgctgtccccatgaggttcaatggtaaatctggagtcgaagtccgactgccaaatgacctggaagatttgaaaggatatacatctctgtccttgtttctccaaaggcccaactcaagagaaaatgggggtactgagaatatgtttgtgatgtaccttggaaataaagatgcctcccgggactacatcggcatggcagttgtggatggccagctcacctgtgtctacaacctgggggaccgtgaggctgaactccaagtggaccagatcttgaccaagagtgagactaaggaggcagttatggatcgggtgaaatttcagagaatttatcagtttgcaaggcttaattacaccaaaggagccacatccagtaaaccagaaacacccggagtctatgacatggatggtagaaatagcaatacactccttaatttggatcctgaaaatgttgtattttatgttggaggttacccacctgattttaaacttcccagtcgactaagtttccctccatacaaaggttgtattgaattagatgacctcaatgaaaatgttctgagcttgtacaacttcaaaaaaacattcaatctcaacacaactgaagtggagccttgtagaaggaggaaggaagagtcagacaaaaattattttgaaggtacgggctatgctcgagttccaactcaaccacatgctcccatcccaacctttggacagacaattcagaccaccgtggatagaggcttgctgttctttgcagaaaacggggatcgcttcatatctctaaatatagaagatggcaagctcatggtgagatacaaactgaattcagagctaccaaaagagagaggagttggagacgccataaacaacggcagagaccattcgattcagatcaaaattggaaaactccaaaagcgtatgtggataaatgtggacgttcaaaacactataattgatggtgaagtatttgatttcagcacatattatctgggaggaattccaattgcaatcagggaaagatttaacatttctacgcctgctttccgaggctgcatgaaaaatttgaagaaaaccagtggtgtcgttagattgaatgatactgtgggagtaaccaaaaagtgctcggaagactggaagcttgtgcgatctgcctcattctccagaggaggacaattgagtttcactgatttgggcttaccacctactgaccacctccaggcctcatttggatttcagacctttcaacccagtggcatattattagatcatcagacatggacaaggaacctgcaggtcactctggaagatggttacattgaattgagcaccagcgatagcggcagcccaatttttaaatctccacagacgtatatggatggtttactgcattatgtatctgtaataagcgacaactctggactacggcttctcatcgatgaccagcttctgagaaatagcaaaaggctaaaacacatttcaagttcccggcagtctctgcgtctgggcgggagcaattttgagggttgtattagcaatgtttttgtccagaggttatcactgagtcctgaagtcctagatttgaccagtaactctctcaagagagatgtgtccctgggaggctgcagtttaaacaaaccaccttttctaatgttgcttaaaggttctaccaggtttaacaagaccaagacttttcgtatcaaccagctgttgcaggacacaccagtggcctccccaaggagcgtgaaggtgtggcaagatgcttgctcaccacttcccaagacccaggccaatcatggagccctccagtttggggacattcccaccagccacttgctattcaagcttcctcaggagctgctgaaacccaggtcacagtttgctgtggacatgcagacaacatcctccagaggactggtgtttcacacgggcactaagaactcctttatggctctttatctttcaaaaggacgtctggtctttgcactggggacagatgggaaaaaattgaggatcaaaagcaaggagaaatgcaatgatgggaaatggcacacggtggtgtttggccatgatggggaaaaggggcgcttggttgtggatggactgagggcccgggagggaagtttgcctggaaactccaccatcagcatcagagcgccagtttacctgggatcacctccatcagggaaaccaaagagcctccccacaaacagctttgtgggatgcctgaagaactttcagctggattcaaaacccttgtataccccttcttcaagcttcggggtgtcttcctgcttgggtggtcctttggagaaaggcatttatttctctgaagaaggaggtcatgtcgtcttggctcactctgtattgttggggccagaatttaagcttgttttcagcatccgcccaagaagtctcactgggatcctaatacacatcggaagtcagcccgggaagcacttatgtgtttacctggaggcaggaaaggtcacggcctctatggacagtggggcaggtgggacctcaacgtcggtcacaccaaagcagtctctgtgtgatggacagtggcactcggtggcagtcaccataaaacaacacatcctgcacctggaactggacacagacagtagctacacagctggacagatccccttcccacctgccagcactcaagagccactacaccttggaggtgctccagccaatttgacgacactgaggatccctgtgtggaaatcattctttggctgtctgaggaatattcatgtcaatcacatccctgtccctgtcactgaagccttggaagtccaggggcctgtcagtctgaatggttgtcctgaccagtaacccaagcctatttcacagcaaggaaattcaccttcaaaagcactgattacccaatgcacctccctccccagctcgagatcattcttcactcaggacacaaaccagacaggtttaatagcgaatctaattttgaattctgaccatggatacccatcactttggcattcagtgctacatgtgtattttatataaaaatcccatttcttgaagataaaaaaattgttattcaaattgttatgcacagaatgtttttggtaatattaatttccactaaaaaattaaatgtcttttaagaaacattcttttccacttgttaaaaaaattaaatatattttaaagcactttaagaatatgaaactttcatatatgttaaaggattataatttatggaattaaaaaatgcagtgtagtccttaaaaaaaa

SEQ ID NO: 47 - DNA, 5175 bp, Homo sapiens
gccccgagtgcaatcgcgggaagccagggtttccagctaggacacagcaggtcgtgatccgggtcgggacactgcctggcagaggctgcgagcatggggccctggggctggaaattgcgctggaccgtcgccttgctcctcgccgcggcggggactgcagtgggcgacagatgtgaaagaaacgagttccagtgccaagacgggaaatgcatctcctacaagtgggtctgcgatggcagcgctgagtgccaggatggctctgatgagtcccaggagacgtgcttgtctgtcacctgcaaatccggggacttcagctgtgggggccgtgtcaaccgctgcattcctcagttctggaggtgcgatggccaagtggactgcgacaacggctcagacgagcaaggctgtccccccaagacgtgctcccaggacgagtttcgctgccacgatgggaagtgcatctctcggcagttcgtctgtgactcagaccgggactgcttggacggctcagacgaggcctcctgcccggtgctcacctgtggtcccgccagcttccagtgcaacagctccacctgcatcccccagctgtgggcctgcgacaacgaccccgactgcgaagatggctcggatgagtggccgcagcgctgtaggggtctttacgtgttccaaggggacagtagcccctgctcggccttcgagttccactgcctaagtggcgagtgcatccactccagctggcgctgtgatggtggccccgactgcaaggacaaatctgacgaggaaaactgcgctgtggccacctgtcgccctgacgaattccagtgctctgatggaaactgcatccatggcagccggcagtgtgaccgggaatatgactgcaaggacatgagcgatgaagttggctgcgttaatgtgacactctgcgagggacccaacaagttcaagtgtcacagcggcgaatgcatcaccctggacaaagtctgcaacatggctagagactgccgggactggtcagatgaacccatcaaagagtgcgggaccaacgaatgcttggacaacaacggcggctgttcccacgtctgcaatgaccttaagatcggctacgagtgcctgtgccccgacggcttccagctggtggcccagcgaagatgcgaagatatcgatgagtgtcaggatcccgacacctgcagccagctctgcgtgaacctggagggtggctacaagtgccagtgtgaggaaggcttccagctggacccccacacgaaggcctgcaaggctgtgggctccatcgcctacctcttcttcaccaaccggcacgaggtcaggaagatgacgctggaccggagcgagtacaccagcctcatccccaacctgaggaacgtggtcgctctggacacggaggtggccagcaatagaatctactggtctgacctgtcccagagaatgatctgcagcacccagcttgacagagcccacggcgtctcttcctatgacaccgtcatcagcagggacatccaggcccccgacgggctggctgtggactggatccacagcaacatctactggaccgactctgtcctgggcactgtctctgttgcggataccaagggcgtgaagaggaaaacgttattcagggagaacggctccaagccaagggccatcgtggtggatcctgttcatggcttcatgtactggactgactggggaactcccgccaagatcaagaaagggggcctgaatggtgtggacatctactcgctggtgactgaaaacattcagtggcccaatggcatcaccctagatctcctcagtggccgcctctactgggttgactccaaacttcactccatctcaagcatcgatgtcaatgggggcaaccggaagaccatcttggaggatgaaaagaggctggcccaccccttctccttggccgtctttgaggacaaagtattttggacagatatcatcaacgaagccattttcagtgccaaccgcctcacaggttccgatgtcaacttgttggctgaaaacctactgtccccagaggatatggtcctcttccacaacctcacccagccaagaggagtgaactggtgtgagaggaccaccctgagcaatggcggctgccagtatctgtgcctccctgccccgcagatcaacccccactcgcccaagtttacctgcgcctgcccggacggcatgctgctggccagggacatgaggagctgcctcacagaggctgaggctgcagtggccacccaggagacatccaccgtcaggctaaaggtcagctccacagccgtaaggacacagcacacaaccacccggcctgttcccgacacctcccggctgcctggggccacccctgggctcaccacggtggagatagtgacaatgtctcaccaagctctgggcgacgttgctggcagaggaaatgagaagaagcccagtagcgtgagggctctgtccattgtcctccccatcgtgctcctcgtcttcctttgcctgggggtcttccttctatggaagaactggcggcttaagaacatcaacagcatcaactttgacaaccccgtctatcagaagaccacagaggatgaggtccacatttgccacaaccaggacggctacagctacccctcgagacagatggtcagtctggaggatgacgtggcgtgaacatctgcctggagtcccgcccctgcccagaacccttcctgagacctcgccggccttgttttattcaaagacagagaagaccaaagcattgcctgccagagctttgttttatatatttattcatctgggaggcagaacaggcttcggacagtgcccatgcaatggcttgggttgggattttggtttcttcctttcctgtgaaggataagagaaacaggcccggggggaccaggatgacacctccatttctctccaggaagttttgagtttctctccaccgtgacacaatcctcaaacatggaagatgaaagggcaggggatgtcaggcccagagaagcaagtggctttcaacacacaacagcagatggcaccaacgggaccccctggccctgcctcatccaccaatctctaagccaaacccctaaactcaggagtcaacgtgtttacctcttctatgcaagccttgctagacagccaggttagcctttgccctgtcacccccgaatcatgacccacccagtgtctttcgaggtgggtttgtaccttccttaagccaggaaagggattcatggcgtcggaaatgatctggctgaatccgtggtggcaccgagaccaaactcattcaccaaatgatgccacttcccagaggcagagcctgagtcaccggtcacccttaatatttattaagtgcctgagacacccggttaccttggccgtgaggacacgtggcctgcacccaggtgtggctgtcaggacaccagcctggtgcccatcctcccgacccctacccacttccattcccgtggtctccttgcactttctcagttcagagttgtacactgtgtacatttggcatttgtgttattattttgcactgttttctgtcgtgtgtgttgggatgggatcccaggccagggaaagcccgtgtcaatgaatgccggggacagagaggggcaggttgaccgggacttcaaagccgtgatcgtgaatatcgagaactgccattgtcgtctttatgtccgcccacctagtgcttccacttctatgcaaatgcctccaagccattcacttccccaatcttgtcgttgatgggtatgtgtttaaaacatgcacggtgaggccgggcgcagtggcctcacgcctgtaatcccagcactttgggaggccgaggcgggtggatcatgaggtcaggagatcgagaccatcctggctaacaaggtgaaaccccgtctctactaaaaatacaaaaaattagccgggcgcggtggtgggcacctgtagtcccagctactcgggaggctgaggcaggagaatggtgtgaacccgggaagcggagcttgcagtgagccgagattgcgccactgcagtccgcagtctggcctgggcgacagagcgagactccgtctcaaaaaaaacaaaacaaaaaaaaaccatgcatggtgcatcagcagcccatggcctctggccaggcatggcgaggctgaggtgggaggatggtttgagctcaggcatttgaggctgtcgtgagctatgattatgccactgctttccagcctgggcaacatagtaagaccccatctcttaaaaaatgaatttggccagacacaggtgcctcacgcctgtaatcccagcactttgggaggctgagctggatcacttgagttcaggagttggagaccaggcctgagcaacaaagcgagatcccatctctacaaaaaccaaaaagttaaaaatcagctgggtatggtggcacgtgcctgtgatcccagctacttgggaggctgaggcaggaggatcgcctgagcccaggaggtggaggttgcagtgagccatgatcgagccactgcactccagcctgggcaacagatgaagaccctatttcagaaatacaactataaaaaaaataaataaatcctccagtctggatcgtttgacgggacttcaggttctttctgaaatcgccgtgttactgttgcactgatgtccggagagacagtgacagcctccgtcagactcccgcgtgaagatgtcacaagggattggcaattgtccccagggacaaaacactgtgtcccccccagtgcagggaaccgtgataagcctttctggtttcggagcacgtaaatgcgtccctgtacagatagtggggattttttgttatgtttgcactttgtatattggttgaaactgttatcacttatatatatatatacacacatatatataaaatctatttatttttgcaaaccctggttgctgtatttgttcagtgactattctcggggccctgtgtagggggttattgcctctgaaatgcctcttctttatgtacaaagattatttgcacgaactggactgtgtgcaacgctttttgggagaatgatgtccccgttgtatgtatgagtggcttctgggagatgggtgtcactttttaaaccactgtatagaaggtttttgtagcctgaatgtcttactgtgatcaattaaatttcttaaatg

SEQ ID NO: 48 - DNA, 5061 bp, Homo sapiens
gggcagggcggctcggccgcctctttctctcgctgcccccgcccctcctcctcctccctctccccgagtgctagcccgggcggccgccgagcttggcgctctctcgcctcgctgcctcctcccccgcgccgcggaccctctcccctcccttgcgttgcccccctctcccgccgcctcctcccgctctcctctcgctctcctcccgcctccttcttccaggcgcggccagcgggggcaagagcgaggtggctgcgaggaggcgtcactgaaagccctgacttggggaaggctgcgggctcggagccggagacgccgagctggggccgggtgagttgggaatcagactcttgagttgacagctggcctatggtttctgcattttgttaagaagcacctcatgcaagcgagggacctgggactgctcacagccaggtggcatttttctgaagttgttcattaagacttcccagcattcctacagatataaataggtgaggccgcaggcggtgctctgggtccgggagcgctgtccccagcatgaacgcggccggcggcgggagtgaatgactgcagctgcgacttccttcccgggccgcccgagcctccttccccaccgactttcttgttttgattaactccgtggactcctgactctttcttcgcccggaacatcaatatgtgtcatgtcattgtcacctgtcgctcgatgctctggaccttgctgagtattgtggtggcttttgccgagctcattgccttcatgagtgcagactggctgatcgggaaagcgaggagccgcggcggcgtggagccggcgggcccgggcgggggctccccggagccctaccaccccaccctgggcatctacgcccgctgcatccggaacccaggggtgcagcacttccagcgggacacgctgtgcgggccctacgccgagagcttcggcgagatcgccagcggcttctggcaggccacagctattttcctggctgtgggaatctttattctctgcatggtggccttggtgtccgtcttcaccatgtgtgtacagagcatcatgaagaaaagcatcttcaatgtctgtgggctgttgcaaggaattgcaggtctattccttatcctcggtttgatactctaccctgctggctggggttgccagaaggccatagactactgtggacattatgcatctgcctacaaacctggagactgctccttgggctgggccttttataccgccattgggggcacagtcctcactttcatctgtgctgtcttctctgcacaagcagaaattgcaacctctagtgacaaagtacaggaagaaattgaagaggggaaaaatctgatctgcctcctttagtttggaagagacaatgccattttctcccttgagtaatcttgtgaaacagtccacagtttcatcatttgagtcaagtggagaactaacctttacctaccaaagccacgttccacggcccgaggcttaaacaggaccaatgagaggccacatccagctacgcaaagttactggacatgcggtctgcagtgcacattataaggaatggaacatgaaaatagtatataatcctagacctggagttgccaagttctgtcagactccatctcccccaggttcaatgaaggataataatctaaatcattagggcagcagtttctctggtaacggaagagaccgtccgccagatctgcaggctgtttctgctccaacactgcttgcttgtgagcatctctgcctcagaatggggttttgggttggagttcttgttttcctctgttctttcaagttgtctccaacgaacagaaaactataaacttactggggacaggatgtgtgctaaagggcacagcaagacactgtcttttgcttagctgaccaaaggggtcagcagggatggcgtggagtcatgctgtggaacttattctaggctgaatcctagggtaaggtggatcaactgaactgtcactccagagattttagaaatttgagtaaagaaacaataaggacctatacaatcatatgagaacaaaaatatgaaatcttgctagtgaagacgtattttttcttcttcccagcagccaggctagcaccagttctggcccagtctcctcttcttctggagatcacatgtttttcttctaaggttaggattgtgctttgactgcgaaaggaaacctcactgtttcctccttccagggactgaggtctccaagctagctgtggcttatgcagatgttcactgggaggacctgccagaatctcggcacttggggggagacctttactcccagtttggtgaccatgctgtagtcagctctatttccaatcccgacagtagcagaatggcattctacaacaaaaagaagctagttatgggagttaagtttttgtagttactggtgttgatcctgaaagcagactgagataacattaaattgctgcaactgaagaactgcagccaagaccttaattccaggaaagcacagaggacaaagttaattcaaaaagaggcgctagatcaaggtcacagcactgcctacacctgtttacaaaaagaatcaaataccactatgaataaggattcaggggtttttaatctactttccataaattaccaatatcactgattcaggaagatagtatctcagaatgaccagagcagcacagaaacaagctactctgacattatgggagcttcaaaattgtatcatgatacagaaacactccttagcactttaagaaagtgagatggaactgccagatttctggaaggagaaaaagtgtaggtatttgggttcattaatctgctcacttgaggactttgttttgaaaaagtaccttctgtggacaaggtattgtgctaccagctatacaaccctgacttcagagtttgcaaccttgccctgagtgaatcatgttaaagctgtctgagtctaaagcaccgtatcttggtgcagaacagataattatacagagatggaatgggacaaccgcagttttactacattctggtgtttggcctatatgagaaaccatcttctcacagattaagggctaagggcaaaaggggtgggaggtgtggaactagccttaatgagtttcccattcctgaaccaaaattcaaagtgagtgagatgtaaatcctgtgattttggtgaagaaaaaaacgggtatcttcatagcagcctaggaaaccttaaccatatctctaacaccacacagaaagaggctggaggagccactggacaaagcttctgtctctgtgtgtacatttataatgttctaaccaagtctcaaaccttgatgaaaaacacaaaatttttccataaacttatcagaagactcacttttctttctttcttggatagagaaaccattttctgacactaggtttacaatctcagtgtccttacaagttaagtcctaagctcacaggatcctccgagcatgtccatcacctgctctttggctaaggtggcagtgtacctctagatcaacctgggaacagtcacaagggagtgtgacttcttggccataataaactcactcgatagtgtttatgttattaatctgaatgcaacagaagacaaaagcacaggcatgcacacacacagaaccccaaaccactaaaaactacctaaacactgacttagtaaatagtaaaaaggtaatgttgggacttttaaaccttgaatccattagccaggcttgggatgaaaggaccatctaaaatcatgctagtctaaaccatgctcttccacacagctgtttaaaaaccactgggtatgaggaatatgctagaaagaaatgttaaaaatagattgttggctcacacttatttttctaataaataggaccattattactaccaggaaagtcttatttattttgcctgaaattggcttaaagaaagtctcatgacgggatgggatgggctgcgcttctcaatgaactctgaggcagaaatatttgccttggattctgtggattctttaaacctgtgtgctaataattcaaacaatgttgcattaattgtataagggtttttgtatagttttcaaacatctgtggtgtaatgatctttgttaaacatatattctgtaaagtgccatagtctttttttatgtgtagcatatttaaaaatatatatgtatattatacatacacaagtttgtgtgaaagatgtgcaataacaaaggtgtatgtatgttttgttgttttgttttggaaactggacaggagtcaaaacagggatgtttgtttctgttttggcaaggagagttccacatttttgccttcatggcttattcagtaacccataattttaatgctacacaaatcttatgtgaagaaaagactggtatgaaatcattttttcctgggtctaaaataatcgctagtgttatgtcaaagttaagcccgcacgccaggcccagttaatgctagtctttcatgtgaaatgtgaagctgccatgttgccttttctcttagtaggataactagtagctggtacataatcactgaggagctatttcttaacatgcttttatagaccatgctaatgctagaccagtatttaagggctaatctcacacctccttagctgtaagagtctggcttagaacagacctctctgtgcaataacttgtggccactggaaatccctgggccggcatttgtattggggttgcaatgactcccaagggccaaaagagttaaaggcacgactgggatttcttctgagactgtggtgaaactccttccaaggctgagggggtcagtaggtgctctggagggactcggcaccacttgatattcaacagccacttgagccaaatataaaattgtatttacagctgatggactcaatttgagccttcaaacttgtagttatcctattatattgtaaactaatacattgtctagcattgatttggttcctgtgcatatgtattttcactatgtgctcccctccccagatcttaattaaaccagattttgcaattcattcttattctttcaaaaaaaaaaaaaaaaaa

SEQ ID NO: 49 - DNA, 3868 bp, Homo sapiens
atgaacctctgaaaactgccggcatctgaggtttcctccaaggccctctgaagtgcagcccataatgaaggtcttggcggcaggagttgtgcccctgctgttggttctgcactggaaacatggggcggggagccccctccccatcacccctgtcaacgccacctgtgccatacgccacccatgtcacaacaacctcatgaaccagatcaggagccaactggcacagctcaatggcagtgccaatgccctctttattctctattacacagcccagggggagccgttccccaacaacctggacaagctatgtggccccaacgtgacggacttcccgcccttccacgccaacggcacggagaaggccaagctggtggagctgtaccgcatagtcgtgtaccttggcacctccctgggcaacatcacccgggaccagaagatcctcaaccccagtgccctcagcctccacagcaagctcaacgccaccgccgacatcctgcgaggcctccttagcaacgtgctgtgccgcctgtgcagcaagtaccacgtgggccatgtggacgtgacctacggccctgacacctcgggtaaggatgtcttccagaagaagaagctgggctgtcaactcctggggaagtataagcagatcatcgccgtgttggcccaggccttctagcaggaggtcttgaagtgtgctgtgaaccgagggatctcaggagttgggtccagatgtgggggcctgtccaagggtggctggggcccagggcatcgctaaacccaaatgggggctgctggcagaccccgagggtgcctggccagtccactccactctgggctgggctgtgatgaagctgagcagagtggaaacttccatagggagggagctagaagaaggtgccccttcctctgggagattgtggactggggagcgtgggctggacttctgcctctacttgtccctttggccccttgctcactttgtgcagtgaacaaactacacaagtcatctacaagagccctgaccacagggtgagacagcagggcccaggggagtggaccagcccccagcaaattatcaccatctgtgcctttgctgccccttaggttgggacttaggtgggccagaggggctaggatcccaaaggactccttgtcccctagaagtttgatgagtggaagatagagaggggcctctgggatggaaggctgtcttcttttgaggatgatcagagaacttgggcataggaacaatctggcagaagtttccagaaggaggtcacttggcattcaggctcttggggaggcagagaagccaccttcaggcctgggaaggaagacactgggaggaggagaggcctggaaagctttggtaggttcttcgttctcttccccgtgatcttccctgcagcctgggatggccagggtctgatggctggacctgcagcaggggtttgtggaggtgggtagggcaggggcaggttgctaagtcaggtgcagaggttctgagggacccaggctcttcctctgggtaaaggtctgtaagaaggggctggggtagctcagagtagcagctcacatctgaggccctgggaggtcttgtgaggtcacacagaggtacttgagggggactggaggccgtctctggtccccagggcaagggaacagcagaacttagggtcagggtctcagggaaccctgagctccaagcgtgctgtgcgtctgacctggcatgatttctatttattatgatatcctatttatattaacttattggtgctttcagtggccaagttaattcccctttccctggtccctactcaacaaaatatgatgatggctcccgacacaagcgccagggccagggcttagcagggcctggtctggaagtcgacaatgttacaagtggaataagcttacgggtgaagctcagagaagggtcggatctgagagaatggggaggcctgagtgggagtggggggccttgctccacccccatcccctactgtgacttgctttagcgtgtcagggtccaggctgcaggggctgggccaatttgtggagaggccgggtgcctttctgtcttgcttccagggggctggttcacactgttcttgggcgccccagcattgtgttgtgaggcgcactgttcctggcagatattgtgccccctggagcagtgggcaagacagtccttgtggcccaccctgtccttgtttctgtgtccccatgctgcctctgaaatagcgccctggaacaaccctgcccctgcacccagcatgctccgacacagcagggaagctcctcctgtggcccggacacccatagacggtgcggggggcctggctgggccagaccccaggaaggtggggtagactggggggatcagctgcccattgctcccaagaggaggagagggaggctgcagacgcctgggactcagaccaggaagctgtgggccctcctgctccacccccatcccactcccacccatgtctgggctcccaggcagggaacccgatctcttcctttgtgctggggccaggcgagtggagaaacgccctccagtctgagagcaggggagggaaggaggcagcagagttggggcagctgctcagagcagtgttctggcttcttctcaaaccctgagcgggctgccggcctccaagttcctccgacaagatgatggtactaattatggtacttttcactcactttgcacctttccctgtcgctctctaagcactttacctggatggcgcgtgggcagtgtgcaggcaggtcctgaggcctggggttggggtggagggtgcggcccggagttgtccatctgtccatcccaacagcaagacgaggatgtggctgttgagatgtgggccacactcacccttgtccaggatgcagggactgccttctccttcctgcttcatccggcttagcttggggctggctgcattcccccaggatgggcttcgagaaagacaaacttgtctggaaaccagagttgctgattccacccggggggcccggctgactcgcccatcacctcatctccctgtggacttgggagctctgtgccaggcccaccttgcggccctggctctgagtcgctctcccacccagcctggacttggccccatgggacccatcctcagtgctccctccagatcccgtccggcagcttggcgtccaccctgcacagcatcactgaatcacagagcctttgcgtgaaacagctctgccaggccgggagctgggtttctcttccctttttatctgctggtgtggaccacacctgggcctggccggaggaagagagagtttaccaagagagatgtctccgggcccttatttattatttaaacatttttttaaaaagcactgctagtttacttgtctctcctccccatcgtccccatcgtcctccttgtccctgacttggggcacttccaccctgacccagccagtccagctctgccttgccggctctccagagtagacatagtgtgtggggttggagctctggcacccggggaggtagcatttccctgcagatggtacagatgttcctgccttagagtcatctctagttccccacctcaatcccggcatccagccttcagtcccgcccacgtgctagctccgtgggcccaccgtgcggccttagaggtttccctccttcctttccactgaaaagcacatggccttgggtgacaaattcctctttgatgaatgtaccctgtggggatgtttcatactgacagattatttttatttattcaatgtcatatttaaaatatttattttttataccaaatgaatcacttttttttttaagaaaaaaaagagaaatgaataaagaatctactcttcg

SEQ ID NO: 50 - DNA, 2575 bp, Homo sapiens
aaagattccttagctggaaaggtctaggaggagactcccgctctgctccctcctgcaccagcgctgtgccccccgccggccaggcagagccatccgatgccgctgggccgcccactgaggatctgctggctgcagcgagtggaaggacctgctcggctggaacgttttttttttttttccctcccaggcgacgtccgatgggtgtgtcgggcaggaggtgatatttgacaggctgcgcgcgggcgagctgccgcggagcacccggcaggggctgacagcatggcctcgcccgacccgcccgccaccagctacgccccgtccgacgtgccctcgggggtcgcgctgttcctcaccatccctttcgccttcttcctgcccgagctgatatttgggttcttggtctggaccatggtagccgccacccacatagtataccccttgctgcaaggatgggtgatgtatgtctcgctcacctcgtttctcatctccttgatgttcctgttgtcttacttgtttggattttacaaaagatttgaatcctggagagttctggacagcctgtaccacgggaccactggcatcctgtacatgagcgctgccgtcctacaagtacatgccacgattgtttctgagaaactgctggacccaagaatttactacattaattcggcagcctcgttcttcgccttcatcgccacgctgctctacattctccatgccttcagcatctattaccactgatgcacaggcgccaggccaagggggaaatgctctttgaaagctccaattattggtccccaaaagcagcttccaacgtttgccatctggatgacaaacggaagatccactaaaacgtccacgggattaacagaacgtccttgcagactgagcgatgacaccacactttgtttggacatttaaattcactctgctgaataggaggaagcttttctttttcctgggaaaacaactgtctcttggaattatctgaccatgaacttgctcttctagacaactcacatcaaagccctcactccactaatggagaatcctagccccactaatgccaagtctgtttggggattttgcctcagctatgggcttccctagagtaggtctaggggaatactcagtctgatcttttttttgtttgttttattttgttttttttgagacggagtctcgctcttcctccaaggctggagtgcagtgacgcgatctccactcactgcaggctccgcctcccgggttcccgccattctcctgcctcagcctcccgagtagccgggactacaggcgcccaccaccatgcccggctaatttagttgtatttttagtagagatggggtttcaccgtattagccaggatggtctcgatctcctgacctcgtgatccgcccgcctcggcctcccaaagtgctgggattacaggcgtgagccaccgcgcccggcctgattctcttaaaattgaagaggtgctgccaaggccttcagatctaacgcagatgcatagaccttgttcctggtacttgttcagcctgtgctggggagccgtggtcccgagttccctgggaggctgacagggtcaagccaccctgcccaccaccctcccacttcccctcccctttcctctccagcattaggattcaagggaaatctgcatgaagccaattttgagggtagacgtgtggggaaaataaatcattatacagtaagacctggggcttgaggggtggggaatggggagggaagggcatagcctgctcctccatgagtctgacatctcggaaactgagcagctgccggacgcctgggtcaggaatccaagaccccacctcttaaggactggttcctcagaaagcaccctcagggaaaaaggtgaaaacattacatccgtggattctcctgccacaaccgcattggaagaaaaggctgccgcaacatctcagcgaggagtgaaggacccatgtcccaggaaccgcgctgcgccacctgcactcacccccctcacattctcttaagcacccggtggccctccgaggcctggcggaatggtggtgcccacggggttgggcaagggctcaccaggacctcaacgggcaaagttgtgcacactaaaatatcaaatcaaggtgcttggttttaaagtaaatgtttttctaaagaaagctgtgctcttctgttgacccagacgaatagggcacagccctgtaactgcacgtgccttctgtcattgggaatgaaataaattattacgagaaagggacttgtcctaactggtttgaggccttacagttttgtatctacatttttcccctcctggggtttgcggggacagggacagaactacaggagtcatgggaaagaaaattctggcttcactactgctcactgctcactttctgatcactctgatactttttttttttttttttttttgcaacctgataccttgaaaagcttctatgtgtctctccttttgttgcctggcagctgtctaggatgatcactgattactatttactaagtagccacatgcaaataaaagttgtttggtaaaaaggaaaaaaaaaaa

SEQ ID NO: 51 - DNA, 758 bp, Homo sapiens
acggccacagtcggattcgctgccgcagcagccgccacccccaggagccgccgggaccctcgcgtcgtcgccgccgcggcccagatccccacaccatgccgtcggagaagaccttcaagcagcggcgcaccttcgaacaaagagtagaagatgtccgacttattcgagagcagcatccaaccaaaatcccggtgataatagaacgatacaagggtgagaagcagcttcctgttctggataaaacaaagttccttgtacctgaccatgtcaacatgagtgagctcatcaagataattagaaggcgcttacagctcaatgctaatcaggccttcttcctgttggtgaacggacacagcatggtcagcgtctccacaccaatctcagaggtgtatgagagtgagaaagatgaagatggattcctgtacatggtctgtgcctcccaggagacgttcgggatgaaattgtcagtgtaaaaccagaaaaaatgcatctcttctagaattttttaaacccttaccaaggaaaaaaaaagggatgttaccaactgagatcgatcagttcatctaatcacagatcatcaaacagtagtgttcccacctaggagtgttaggaagttgtgtttgtgtttcaagcagaaaaactgagctccaagtgagcacattcagctttggaaactatattatttaatgtaggctagcttgttttcaaattttaaaagtttaaaaataaaatactttgcattctaaaaaaaaaaaaaa

SEQ ID NO: 52 - DNA, 476 bp, Homo sapiens
aaagaagaaaaacatgtgaatacgatacaggaccaggccccacatcctgataacatgcagtgcctcttcaccagccatgccttttgcctcaccctttctgttgctatgttctctatcctgcgttggacaaagagtgacaggcgaggttttctaggcatctccatcaaaatgagaaggaaaaacctccatctctcagcacttattaacctaaaagataagttgcactttctacttttcttaggtggggattacatgagccccaccagtcatcacggacacatcgtttgtacctatcagatgtatcagtagagatggggacattaatttgtgtaggggtgtcagcagtgctctggggagaaagagatattggcatacacagtggtctggagcatgtcttcacaaaatagtgtttgtggggagccagagattcctaaaagaacagtgaatagcacagtctcattaaaaaaaaaaaaaaa

SEQ ID NO: 53 - DNA, 3558 bp, Homo sapiens
cagaccccagttcgccgactaagcagaagaaagatcaaaaaccggaaaagaggagaagagcaaacaggcactttgaggaacaatcccctttaactccaagccgacagcggtctaggaattcaagttcagtgcctaccgaagacaaaggcgccccgagggagtggcggtgcgaccccagggcgtgggcccggccgcggagcccacactgcccggctgacccggtggtctcggaccatgtctcccgccccaagacccccccgttgtctcctgctccccctgctcacgctcggcaccgcgctcgcctccctcggctcggcccaaagcagcagcttcagccccgaagcctggctacagcaatatggctacctgcctcccggggacctacgtacccacacacagcgctcaccccagtcactctcagcggccatcgctgccatgcagaagttttacggcttgcaagtaacaggcaaagctgatgcagacaccatgaaggccatgaggcgcccccgatgtggtgttccagacaagtttggggctgagatcaaggccaatgttcgaaggaagcgctacgccatccagggtctcaaatggcaacataatgaaatcactttctgcatccagaattacacccccaaggtgggcgagtatgccacatacgaggccattcgcaaggcgttccgcgtgtgggagagtgccacaccactgcgcttccgcgaggtgccctatgcctacatccgtgagggccatgagaagcaggccgacatcatgatcttctttgccgagggcttccatggcgacagcacgcccttcgatggtgagggcggcttcctggcccatgcctacttcccaggccccaacattggaggagacacccactttgactctgccgagccttggactgtcaggaatgaggatctgaatggaaatgacatcttcctggtggctgtgcacgagctgggccatgccctggggctcgagcattccagtgacccctcggccatcatggcacccttttaccagtggatggacacggagaattttgtgctgcccgatgatgaccgccggggcatccagcaactttatgggggtgagtcagggttccccaccaagatgccccctcaacccaggactacctcccggccttctgttcctgataaacccaaaaaccccacctatgggcccaacatctgtgacgggaactttgacaccgtggccatgctccgaggggagatgtttgtcttcaaggagcgctggttctggcgggtgaggaataaccaagtgatggatggatacccaatgcccattggccagttctggcggggcctgcctgcgtccatcaacactgcctacgagaggaaggatggcaaattcgtcttcttcaaaggagacaagcattgggtgtttgatgaggcgtccctggaacctggctaccccaagcacattaaggagctgggccgagggctgcctaccgacaagattgatgctgctctcttctggatgcccaatggaaagacctacttcttccgtggaaacaagtactaccgtttcaacgaagagctcagggcagtggatagcgagtaccccaagaacatcaaagtctgggaagggatccctgagtctcccagagggtcattcatgggcagcgatgaagtcttcacttacttctacaaggggaacaaatactggaaattcaacaaccagaagctgaaggtagaaccgggctaccccaagtcagccctgagggactggatgggctgcccatcgggaggccggccggatgaggggactgaggaggagacggaggtgatcatcattgaggtggacgaggagggcggcggggcggtgagcgcggctgccgtggtgctgcccgtgctgctgctgctcctggtgctggcggtgggccttgcagtcttcttcttcagacgccatgggacccccaggcgactgctctactgccagcgttccctgctggacaaggtctgacgcccaccgccggcccgcccactcctaccacaaggactttgcctctgaaggccagtggcagcaggtggtggtgggtgggctgctcccatcgtcccgagccccctccccgcagcctccttgcttctctctgtcccctggctggcctccttcaccctgaccgcctccctccctcctgccccggcattgcatcttccctagataggtcccctgagggctgagtgggagggcggccctttccagcctctgcccctcaggggaaccctgtagctttgtgtctgtccagccccatctgaatgtgttgggggctctgcacttgaaggcaggaccctcagacctcgctggtaaaggtcaaatggggtcatctgctccttttccatcccctgacataccttaacctctgaactctgacctcaggaggctctgggcactccagccctgaaagccccaggtgtacccaattggcagcctctcactactctttctggctaaaaggaatctaatcttgttgagggtagagaccctgagacagtgtgagggggtggggactgccaagccaccctaagaccttgggaggaaaactcagagagggtcttcgttgctcagtcagtcaagttcctcggagatctgcctctgcctcacctaccccagggaacttccaaggaaggagcctgagccactggggactaagtgggcagaagaaacccttggcagccctgtgcctctcgaatgttagccttggatggggctttcacagttagaagagctgaaaccaggggtgcagctgtcaggtagggtggggccggtgggagaggcccgggtcagagccctgggggtgagcctgaaggccacagagaaagaaccttgcccaaactcaggcagctggggctgaggcccaaaggcagaacagccagagggggcaggaggggaccaaaaaggaaaatgaggacgtgcagcagcattggaaggctggggccgggcaggccaggccaagccaagcagggggccacagggtgggctgtggagctctcaggaagggccctgaggaaggcacacttgctcctgttggtccctgtccttgctgcccaggcagcgtggaggggaagggtagggcagccagagaaaggagcagagaaggcacacaaacgaggaatgaggggcttcacgagaggccacagggcctggctggccacgctgtcccggcctgctcaccatctcagtgaggggcaggagctggggctcgcttaggctgggtccacgcttccctggtgccagcacccctcaagcctgtctcaccagtggcctgccctctcgctcccccacccagcccacccattgaagtctccttgggccaccaaaggtggtggccatggtaccggggacttgggagagtgagacccagtggagggagcaagaggagagggatgtcgggggggtggggcacggggtaggggaaatggggtgaacggtgctggcagttcggctagatttctgtcttgtttgtttttttgttttgtttaatgtatatttttattataattattatatatgaattccaaaaaaaaaaaaaaaaaaaaa

SEQ ID NO: 54 - DNA, 5587 bp, Homo sapiens
gagtcggggataaacactccgcggcggtggcggctgctgctctgctccgggttctgtcactgtgtcggcggtgcccagctcactggccccctccctctcttgtcgagcgtggttgccagagaggctccctcagccctgctccgcggggtccacagcgggctccacagcgggctccatagcgggctccacagcggtccggcggcggcagcgagcccgtgggcagtgggggttggtcccgtggctccggcccccggtgcagaatggcggcggcggttcggatgaacatccagatgctgctggaggcggccgactatctggagcggcgggagagagaagctgaacatggttatgcctccatgttaccatacaataacaaggacagagatgccttaaaacggaggaacaaatccaaaaagaataacagcagtagcagatcaactcacaatgaaatggagaagaatagacgggctcatcttcgcttgtgcctggagaagttgaaggggctggtgccacttggacccgaatcaagtcgacacactacgttgagtttattaacaaaagccaaattgcacataaagaaacttgaagattgtgacagaaaagccgttcaccaaatcgaccagcttcagcgagagcagcgacacctgaagaggcagctggagaagctgggcattgagaggatccggatggacagcatcggctccaccgtctcctcggagcgctccgactccgacagggaagaaatcgacgttgacgtggagagcacggactatctcacaggtgatctggactggagcagcagcagtgtgagcgactctgacgagcggggcagcatgcagagcctcggcagtgatgagggctattccagcaccagcatcaagagaataaagctgcaggacagtcacaaggcgtgtcttggtctctaagagagtgggcactgcggctgtctccttgaaggttctccctgttggttctgattaggtaacgtattggacctgcccacaactcccttgcacgtaaacttcagtgtcccaccttgaccaaaatcagctttgtaactgttttcaaggaggtgcttaggattgtgggtttctgattgcatccactagcttctctttttctcgccataaaaatttgtctctgagagactatacattccaatcaatttgaagcatccaagaattcttagaccgaataagcaatgtccacatctcagcaatccccctctttgctctcctcgtgtcctctcccagacctttcttccagttttctggcttactgtgttacttgcctaggaggaatgtccaagtgtgtcttgtacttaggaaactgaaggaaacaaacttttgaaattgagatcctgatctcagaactccaaagtaagctttgaaagcagcatttaagagcacttaaccatggacctcaccaccagtgaggaagtcaggaatacctctagaaaacacgcccttcacaccgcgcatgctcattcccccgacgcgccgcgtgtggatgggagcagtatttctcactttaaaatggacaccttgatagtgtgtctctggggttgcacagctcatcaaagttccaaattgtttgttctcacaaacaaaacggtacaatctatttttgtgcgatgttcttgggacctcgctgtgttctgctatctcgaggcacattctcccctccaactttgttaatgctacttgtctctggaacatttttttttcctacctcagagataaatgagatctccatttcccacttaacacagtgattatccttttttccccccccaaaatagtgacatttggtccaattataatctattttcctattgaactttcagcaataactgagctgtggcactagcagagctagtagccattatcagtgaaagaaaaagtccacatttctactctctgttgcaggtgaacaggagaggatggtacactgttactagaactcctctccttattgattatttttggacacacccagaaacttctttatggaggcttttgggttgatagtttaaaaggctgatttttctttttggttatgatttctcccttaagtggtctccgactttgtagcatttttatttaagctaaaacagagcacatgtatatgtacataagacacattaaatctataaatactatttattcattttatataaactaatgtaatggaaaacaaattcttatgactttgtggttttatagatgttctagaaactttgtatgtaggtatctacaaaattagttcattcccctgaatatttttgcattcatatttttgaggtcttgatgttttcagcctctggcgaatctttttcattgaatttgaaccatttgtaaaatctgtgatgctgaagcagagtgtgtcacaaagtgatgagaacattactaaaatccacggacgcactgcgacctaagggctcaacggctgactcggcagcgggcagccaccccacgctcccctgcggtcactcgcacaccacagcctgaagctcccccagcgcctgcacctcgcacacagctaaggtcaaagttcaaacgcactccacacggaagctcattctatacccgaagagcagtctcagaaagcaagattacttttgtgttttttaaaaaatgattctttaatgtatttttctaaacattctgattggaagtagtggattcctaaatgattccaaagtcacctgtaattcttctgtttttgttttgttctgtcttttcttcattttggctttgggtggggggaggggcaggtgacacaaaggattttttttttttttttttaatttttggaatcttttccaataaccagctaaagatttgcactgaaatacaacttgtatgccttttgcatttttaaagcctgcttcctggatttaagcagagtgatagtgttcaaagagccagttcagcctgtaacatatttgaaaaagatatgtctgcactttgaggtcccttttgaatgccattcactagacctctcaagcattttgtttcattgctacatccaagcgcctcacaagtccacaatgcgggacagcatcaaaagctcaagactttggaaaaagcttgtgggcttgcactgggggagggaagggaacaaaatttgtgtacttctttgtttaatttagaaataaggcatccaagagatgccattattttctgtgtttcaattgttgtgcctttgagttaaactgcatttttgtcttttggttgaaatctgaaatgtactgtcccaatataaaacagtaattatttgacctttgcactgtttgtctggtccttttcagtttgattgcatataaatgtggaacttgatagatctctatatttttaatgcacttgtgataaactggcagcagggttagacattactttcaaagcttgaggtagaccgagtcagcatgctagacaggcttctctctctaaccaaaactgtaatcttcaggaccagcaaactcagcccaaggcagctaatccccccaaccccatcctccgcgccccgtgcggctgatcggcagccctgattcgccaatttgtcctctctcattcactgatccaccagcctgactgctaagagctatagtctttttagttgttttgtctttttaagcaagatgaaaacctttctattagggattttggggttgggaggggatgggcagagatataaaccccagcctttaagactttgacaattgtacgtaaatacagatgtgtataaatataggcacatgcatatttttatgtgaaagttgattttaaaaaactaaaaaaatctaaactgcactcttattgataccatcataacgcaagtgggaaaaataagagtacgcagtctaatttaatttcatgcagtgggaaaatatatatgtgtgcttctgtaacatcctgaaaacatagctttccatcccctgttggctttgaatggtgggccgagcacccaggtcgtctgtattttggttttcttttgctaagcagagatcttgaattcttcaaggtgctgatagcaactgctggctcctttctgtagtcacacacctaatgctagtttagtgattcaaaatgcatcacatttttaggcaggacctagattttccctgtcaacctaagatgaaaataatttcagtgttgattcagaactgaacattaagtaggccctcgtcctgcagttggccacttgagtgttttgttttgtttttattttttaaggtgggcattttcctttaacctctactttttcaaaagcaacaaaggggcctcaacctgagtttcctatgggcctctcttctgcatccccaaagcggccaagagcaaatcctgggggataagaaaaaagtgtaaactaggtaggattgtgatgctcaaaataaccatctagcaatatcttggagcttgagaatagattttgtgggcttatttcttcttgcctcttccccatcctttcaagagagaacttatttttgaaaagtatctatatatacacacacacacacacacacacatattattatttaggtttttataccatactgtattggcgagaataccactatcattgtcctttacagtctatttcttcccccaagtcttggtctttttttattttctattttttcatgaaccacacaggagactttaacatcctggtcttttctgtttcttctttgtttccccaagtttgtctgtccccctttgccttccctgagtgttgaacatcaggtagtaaaaggctaaacgcaatttcttgcatgtcaatctattctttttctatgtttgactctgatgcagtgtgtttagcgtgtctagtagctggctactcctatttaaaaactcttcctggtagaagacaacccaaagacccttttcgatgaggtggtttctcattctacatcctctgatctctatagactgtaggatgctttgctttcaaagataactgggttagagggtggggtgtgcaataggtgatttatcatggtttttttcattatcaatattacatggatgattttctcagattcttctgaaagaagaaattgacaggcactgctagattcagctattgaatggctgaagagattgagtatttgaccttctctcaaaatcataaagtgagaattcataaggcacccaatgttaagatttatccagatttttacattttgatttcttctctctgtggggtggcaagttgagggagcattcttcattttagcttttacctgacaaccaaacttgcctttaccccatccctagaattggtgctcttggaatattgctgttaccatcatttttggggggccatcttcctaatgctacacacagcctgacaggggagcagcagatgaaagggtatgctattctgtttccagatgtttctttatgtaaatatgacgccaatgtaaatcctgtgtcaagatcatagagaatggtgctttttactacagttagcacatgcatttttagaaactactacatgttttagagaatctttgctgtgtatatgtaaactgtattgttcaactgttaacaaataataaattatttcattattaaagaaa

SEQ ID NO: 55 - DNA, 9758 bp, Homo sapiens
agatgcagggaagttttgcctcttcctgaaaattatattattagctttttaaaaatcaggatgactgctagttttgtttaaagtatttgttctggaaatactaaagttggagtctaccagactgaggttagaagcattttctttggcagcaagaagataattttatagaagccatgcctgttcttggggttgcctcaaaactgaggcagccagctgttgggtcaaagcctgtgcatactgctcttccgataccaaatcttggcactactgggtcacagcactgttcttcaagacctttggaacttactgaaacagagagctccatgctttcttgtcagcttgcgttaaaatcaacctgtgaatttggagagaagaaacccctccaaggaaaagccaaggagaaagaagacagcaagatttacactgactgggccaaccactacctagcaaaatcaggccacaagcggctgatcaaggacttgcaacaagacattgcagatggagtactcctagcagaaatcatccagattattgcaaatgaaaaagttgaagatatcaatggatgtcctagaagtcagtctcagatgattgaaaatgttgatgtctgccttagttttctagcagccagaggggtaaatgttcaaggtctatctgctgaagaaataagaaatggaaacttaaaagccattctagggctgtttttcagtttatctcgctacaagcagcaacaacaccatcaacaacagtactatcagtccttggtggaacttcagcagcgagttactcacgcttcccctccatcggaagccagccaggccaaaacccagcaagatatgcagtccagtctggcagccagatatgcaactcagtctaatcacagtggaattgcaaccagtcaaaaaaagcctactaggcttccagggccctctagggtgcctgctgcaggaagcagcagcaaggtccagggagcctctaatttaaataggagaagtcagagctttaacagcattgacaaaaacaagcctccaaattatgcaaatggaaacgaaaaagattcctccaaaggacctcaatcgtcttcaggtgtaaatggtaacgtgcagcctcccagtactgctgggcagcctcctgcctctgccatcccttctccaagtgccagcaagccctggcgcagcaagtccatgaatgtcaaacacagtgccacctccaccatgttgactgtaaagcagtcaagtacagccacctcccccacaccatcttcagacagactgaagccacctgtctcagaaggggtcaaaactgctccctcaggacagaaatccatgcttgagaaattcaagctagtcaatgcccggactgctttacgccccccgcagcctcccagttcaggacctagtgatggtgggaaggatgatgatgccttttctgaatctggtgaaatggaaggttttaacagtggtctgaatagtggtggctcaacaaatagcagtcccaaagtgtcacctaagttggcccctccaaaagctggaagcaaaaatctcagcaataaaaagtctttgctacagccaaaggaaaaagaagaaaagaacagggacaaaaataaagtttgcactgaaaaaccagtcaaagaagagaaggatcaggtgacagagatggctccaaaaaagacctccaaaattgcaagcttgatccctaagggcagcaagacaacagcagctaagaaggaaagcttaattccgtcttccagtggtattccaaaaccaggctctaaagttccaacagtaaagcaaaccatttcacctggcagcacagcaagcaaagagtctgagaaattcaggactaccaaggggagcccttcccagtccttatctaagcctataaccatggagaaagcaagtgcttctagttgtcctgcccctttggaaggaagggaagctggccaagcttctccttctggttcctgtaccatgacagtggcacaaagcagtgggcagagcacaggaaatggtgctgtccaactccctcaacagcagcaacatagccacccgaataccgcgacagtggcaccattcatttacagggcacattcagaaaatgaaggtaccgctttaccatcggctgactcctgtaccagtcctacaaagatggacttatcatatagtaagactgctaagcagtgcctggaggagatatctggtgaagaccctgaaacaagaagaatgagaacagttaaaaacatagcagacttgaggcagaatttagaagagactatgtccagtcttcgtgggactcagataagccacagcaccctggagacaacatttgacagcactgtgacaacagaagttaatggaaggaccatacccaacttgacaagtcgacccacccccatgacctggaggttgggccaggcatgtccgcgacttcaggcgggagatgctccctccctgggtgctggctatcctcgcagtggtaccagtcgattcatccacacagacccctcgaggttcatgtataccacgcctctccgtcgagctgctgtctctaggctgggaaacatgtcacagattgacatgagtgagaaagcaagcagtgacctggacatgtcttctgaggtcgatgtgggtggatatatgagtgatggtgatatccttgggaaaagtctcaggactgatgacatcaacagtgggtacatgacagatggaggacttaacctatatactagaagtctgaaccgaataccagacacagcaacttcccgggacatcatccagagaggggttcacgatgtgacagtggatgcagacagctgggatgacagcagttcagtgagcagtggtctcagtgacacccttgataacatcagcactgatgacctgaacaccacatcctctgtcagctcttactccaacatcaccgtcccctctaggaagaatactcagctgaggacagattcagagaaacgctccaccacagacgagacctgggatagtcctgaggaactgaaaaaaccagaagaagattttgacagccatggggatgctggtggcaagtggaagactgtgtcctctggacttcctgaagaccccgagaaggcagggcagaaagcttccctgtctgtttcacagacaggttcctggagaagaggcatgtctgcccaaggaggggcgccatctaggcagaaagctggaacaagtgcactcaaaacacccgggaaaaccgatgatgccaaagcttctgagaaaggaaaagctcccctaaaaggatcatctctacaaagatctccttcagatgcaggaaaaagcagtggagatgaagggaaaaagcccccctcaggcattggaagatcgactgccaccagctcctttggctttaagaaaccaagtggagtagggtcatctgccatgatcaccagcagtggagcaaccataacaagtggctctgcaacactgggtaaaattccaaaatctgctgccattggcgggaagtcaaatgcagggagaaaaaccagtttggacggttcacagaatcaggatgatgttgtgctgcatgttagctcaaagactaccctacaatatcgcagcttgccccgcccttcaaaatccagcaccagtggcattcctggccgaggaggccacagatccagtaccagcagtattgattccaacgtcagcagcaagtctgctggggccaccacctcgaaactgagagaaccaactaaaattgggtcagggcgctcgagtcctgtcaccgtcaaccaaacagacaaggaaaaggaaaaagtagcagtctcagattcagaaagtgtttctttgtcaggttcccccaaatccagccccacctctgccagcgcctgtggtgcacaaggtctcaggcagccaggatccaagtatccagatattgcctcacccacatttcgaaggttgtttggtgccaaggcaggtggcaaatctgcctctgcacctaatactgagggtgtgaaatcttcctcagtaatgcccagccctagtaccacattagcgcggcaaggcagtctggagtcaccgtcgtccggtacgggcagcatgggcagtgctggtgggctaagcggcagcagcagccctctcttcaataaaccctcagacttaactacagatgttataagcttaagtcactcgttggcctccagcccagcatcggttcactctttcacatcaggtggtctcgtgtgggctgccaatatgagcagttcctctgcaggcagcaaggatactccgagctaccagtccatgactagcctccacacgagctctgagtccattgacctccccctcagccatcatggctccttgtctggactgaccacaggcactcacgaggtccagagcctgctcatgagaacgggtagtgtgagatctactctctcagaaagcatgcagcttgacagaaatacactacccaaaaagggactaagatataccccatcatctcggcaggccaaccaagaagagggcaaagagtggttgcgttctcattctactggagggcttcaggacactggcaaccagtcacctctggtttccccttctgccatgtcatcttctgcagctggaaaataccacttttctaacttggtgagcccaacaaatttgtctcagtttaaccttcccgggcccagcatgatgcgctcaaacagcatcccagcccaagactcttccttcgatctctatgatgactcccagctttgtgggagtgccacttctctggaggaaagacctcgtgccatcagtcattcgggctcattcagagacagcatggaagaagttcatggctcttcattatcactggtgtccagcacttcttctctttactctacagctgaagaaaaggctcattcagagcaaatccataaactgcggagagagctggttgcatcacaagaaaaagttgctaccctcacatctcagctttcagcaaatgctcaccttgtagcagcttttgaaaagagcttagggaatatgactggccgattgcaaagtctaactatgacagcggaacaaaaggaatctgaacttatagaactaagagaaaccattgaaatgctgaaggctcagaattctgctgcccaggcggctattcagggagcactgaatggtccagaccatcctcccaaagatcttcgcatcagaagacagcattcctctgaaagtgtttctagtatcaacagtgccacaagccattccagtattggcagtggtaatgatgccgactccaagaagaagaaaaagaaaaactgggtgaactctagaggaagtgagctgagaagttctttcaaacaagcctttgggaagaaaaagtccaccaagcctccttcatcacattctgacattgaagagcttactgattcatcccttccggcatcccccaagttaccccataatgctggtgactgtggctcagcatccatgaagccctcacaatctgcttcagcgatctgtgaatgcacagaagctgaggcagagataattctgcagctgaagagcgagctcagagaaaaggaattaaaattaacggatattcggctggaggccctcagctctgctcatcatcttgatcagatccgggaagccatgaaccggatgcagaatgaaattgaaatactgaaagctgaaaatgaccggttgaaggcagaaactggtaacacagctaagcctactcggccaccgtcagaatcctcaagcagcacctcctcttcatcttccaggcagtcattaggactttctctaaacaatttgaacatcacagaggctgttagctcagatattttgctagatgatgctggtgatgcaactggacataaagatggccgcagtgtgaaaattatagtctccataagcaagggctatggtcgagcaaaggaccaaaaatctcaggcatatttgataggatccattggtgttagtggaaaaaccaagtgggatgtcttagatggtgtaataagacgtctctttaaggaatatgtattccgaattgatacatccactagccttggtctgagctctgactgcattgctagctactgtataggagacttaattagatcccataacctagaagtgcctgaattgctgccttgtggataccttgttggagataataacatcatcactgtgaacctcaaaggggtagaagaaaatagtttggacagttttgtttttgatacgctgattcctaaaccaattacccaaaggtactttaacttgttgatggagcatcacagaattatactctcaggaccgagtggtactggaaagacctatttggcaaacaaacttgctgaatatgtaataaccaaatctggaaggaaaaaaacagaggatgcaattgccacttttaatgtggaccacaagtcaagtaaggaattgcaacaatatctagctaacctggctgaacagtgcagtgctgataataatggagtggagctcccagttgtaataattcttgataatcttcatcatgtgggctctctgagtgatatcttcaatggttttctcaattgtaaatacaacaaatgtccatatattattggaacaatgaatcagggagtttcttcatcaccaaatctagagctgcatcacaatttcaggtgggtattatgtgcaaatcatacagaaccagtgaaaggctttttaggcagatatcttcgaagaaaactcatagagatagaaattgaaaggaacattcgcaataatgacctagtcaaaattatagattggattccgaagacgtggcatcatctcaacagttttttggaaacacacagttcttctgacgttaccattggtccccgactattccttccttgccccatggatgtagaaggttctagagtatggttcatggatctctggaactattctttagtaccttatattctggaggcagtgagagagggtcttcagatgtatgggaaacgcacaccatgggaagatccttcaaagtgggtgcttgacacatatccatggagctcagcaactctgcctcaggagagcccagccttacttcagctgcgaccagaagatgttgggtatgaaagctgcacatccactaaggaagccacaacctcaaagcacattccgcaaactgacacagaaggagatcccctgatgaatatgctaatgaaactccaagaagcagccaattactcgagcacacaaagctgcgacagcgaaagcaccagccaccatgaagacattttggattcatctcttgaatctaccctctagagggtgaaaaaagttaagggaaaagactttgcttttaaaaaaatgtttcaaaagaaaggtattttcactaaaccactgccagtataaaagcaccctgtcaagggccctgacccagagttgtggtctccaaggaggcagcagaactaagtctgaaccgccaagatgctaaattgcaatggaagcttaactttagtttatttctaagcattttttatatctgtggagtaatagaaagctccattactcaactggaaaggaccctaatgacagggcaactgaacagattgcacatgggatagccaaactggactttctttgtttcctctttaaaagtttacaatgcagaccattttttgtcccttccttttgtttcctctgaggggctgttcgccccaggcagggtccatctttctgatctgtccaacctcctttgtgccacacggtgctggtcacagggcttcagtagtgtttgtgttgtgcgctcaccccattccagaacaaatccaagaggccagtcctccataagcacaaatggaattgtgcaaccaccagaaaaacactactgtggcaaactggagaagtgccaatttaattctaactgccacgttctcatgatgtgctccaccaactttttagtatatgagtcactggttttataaggttgtttttaccacagtggtctttttaaaccacctgcccactcccttaacaagagttttataccaattattagtcaacactgataaaaggcttttttagggctttatttgtttgagccttttcagtgaaagaaggaacatttcctatggtgctgtctcactgccttaaaacagatttctatgacagtttaacagttggtttaaatcctaaaccattggtaatttccactgtcttttcatttacaaccaagcaacaccagttaacatagtagcctcatctctatatatctttctcttttttttttttttgaagaaatggataggagaaagatcagtatttttagccttgtgaatagatcgctttgcctatcctccaaaatattaaaataacccagaaatgctctttgaccgtcacttaaaacctaagacatgtggcgaaattccatccagttctaagtgaaagagtttcagaaggcagaagattttgaattattatccagcagggctggaagcactagatgcagcatgagcacaactattcggctttccttccctattgtttttgtttttttaatgagttttgacgcatgttgttttgattgctattgttgtacatgagaaattcagcattaaagaacactgaagcggtaaggtcactgtggaagaggaagcgtttatactgtaaaagaaggttagatttgcacagtctactgggtaggtattgtaaataataatttttaaaacttgcacaaatcaaaacaaacacaaacaaaattgtattttatcctgttggtgttaagaggtgtttcacttgctgagatttcctgtacattgcaaacaaatacagaatgcaaaccctcaaagctgtattatctggtgtgtttgtcctgtatttacagttgtttttgactatgcaggagctatcagtgctagagtgagcatgcttcaaaactgtacatgaagccaatatatttttggataagtaaaactgtctgaaagtacatctgtcatggcaggctttaaagagagtgcatgaaaactgatcagtcattggagaagttaccaccacacacaaaggacaggttttaagtttatgaaacccaagggctaggccatggtatagacttcttctatgagtgtgtgaaaatgtgttacttttaggacgtgtatttggtgctactctctgtgaccaccaatgggtcagttgctatagaacaacaacaccacgaaacatctgtgcagttttcagagtgtcacaaagtcaataggtccttacacggtgctattgccctaagggaaatccgaactgaatttatgcacatagaattgtcaccctgactttgaagcctcaaacatggatcaaatctgttgtgaaacatcaatatatgtagctggatgagtgactagtttcccttgtataatatgtgatctaagaaaattgctaatctttccctgccattttgagaaacacagtccaaacatgagcataaacagaatttcctgcaatacatcccagtaggtccacctagtttacaacttaaactagtttgtgaaacatttgtctgtatacattttatattttgtacattttgatgtaacatatcatgtaaataggcagaaacagtgaaataaatcatctgaaaagttttgtagtctttgtaaagccccaacaataagtacttggtgtcaatggacttaactggatgatgtattttctattggtttattgttcctctagcttgtaaaccagcttgcatatatttttttgcaaatgtgcaccctgtatctgtctaaattattactttgccattaaagtggaattatttattgacaa

SEQ ID NO: 56 - DNA, 3074 bp, Homo sapiens
aacaaacctcgcctggctcccagctggtgctgaagctcgtcagttcaccatccgccctcggcttccgcggggcgctgggccgccagcctcggcaccgtcctttcctttctccctcgcgttaggcaggtgacagcagggacatgtctcgggagatgcaggatgtagacctcgctgaggtgaagcctttggtggagaaaggggagaccatcaccggcctcctgcaagagtttgatgtccaggagcaggacatcgagactttacatggctctgttcacgtcacgctgtgtgggactcccaagggaaaccggcctgtcatcctcacctaccatgacatcggcatgaaccacaaaacctgctacaaccccctcttcaactacgaggacatgcaggagatcacccagcactttgccgtctgccacgtggacgcccctggccagcaggacggcgcagcctccttccccgcagggtacatgtacccctccatggatcagctggctgaaatgcttcctggagtccttcaacagtttgggctgaaaagcattattggcatgggaacaggagcaggcgcctacatcctaactcgatttgctctaaacaaccctgagatggtggagggccttgtccttatcaacgtgaacccttgtgcggaaggctggatggactgggccgcctccaagatctcaggatggacccaagctctgccggacatggtggtgtcccacctttttgggaaggaagaaatgcagagtaacgtggaagtggtccacacctaccgccagcacattgtgaatgacatgaaccccggcaacctgcacctgttcatcaatgcctacaacagccggcgcgacctggagattgagcgaccaatgccgggaacccacacagtcaccctgcagtgccctgctctgttggtggttggggacagctcgcctgcagtggatgccgtggtggagtgcaactcaaaattggacccaacaaagaccactctcctcaagatggcggactgtggcggcctcccgcagatctcccagccggccaagctcgctgaggccttcaagtacttcgtgcagggcatgggatacatgccctcggctagcatgacccgcctgatgcggtcccgcacagcctctggttccagcgtcacttctctggatggcacccgcagccgctcccacaccagcgagggcacccgaagccgctcccacaccagcgagggcacccgcagccgctcgcacaccagcgagggggcccacctggacatcacccccaactcgggtgctgctgggaacagcgccgggcccaagtccatggaggtctcctgctaggcggcctgcccagctgccgcccccggactctgatctctgtagtggccccctcctccccggccccttttcgccccctgcctgccatactgcgcctaactcggtattaatccaaagcttattttgtaagagtgagctctggtggagacaaatgaggtctattacgtgggtgccctctccaaaggcggggtggcggtggaccaaaggaaggaagcaagcatctccgcatcgcatcctcttccattaaccagtggccggttgccactctcctcccctccctcagagacaccaaactgccaaaaacaagacgcgtagcagcacacacttcacaaagccaagcctaggccgccctgagcatcctggttcaaacgggtgcctggtcagaaggccagccgcccacttcccgtttcctctttaactgaggagaagctgatccagtttccggaaacaaaatccttttctcatttggggaggggggtaatagtgacatgcaggcacctcttttaaacaggcaaaacaggaagggggaaaaggtgggattcatgtcgaggctagaggcatttggaacaacaaatctacgtagttaacttgaagaaaccgatttttaaagttggtgcatctagaaagctttgaatgcagaagcaaacaagcttgatttttctagcatcctcttaatgtgcagcaaaagcaggcgacaaaatctcctggctttacagacaaaaatatttcagcaaacgttgggcatcatggtttttgaaggctttagttctgctttctgcctctcctccacagccccaacctcccacccctgatacatgagccagtgattattcttgttcagggagaagatcatttagatttgttttgcattccttagaatggagggcaacattccacagctgccctggctgtgatgagtgtccttgcaggggccggagtaggagcactggggtgggggtggaattggggttactcgatgtaagggattccttgttgttgtgttgagatccagtgcagttgtgatttctgtggatcccagcttggttccaggaattttgtgtgattggcttaaatccagttttcaatcttcgacagctgggctggaacgtgaactcagtagctgaacctgtctgacccggtcacgttcttggatcctcagaactctttgctcttgtcggggtgggggtgggaactcacgtggggagcggtggctgagaaaatgtaaggattctggaatacatattccatgggactttccttccctctcctgcttcctcttttcctgctccctaacctttcgccgaatggggcagcaccactgacgtttctgggcggccagtgcggctgccaggttcctgtactactgccttgtacttttcattttggctcaccgtggattttctcataggaagtttggtcagagtgaattgaatattgtaagtcagccactgggacccgaggatttctgggaccccgcagttgggaggaggaagtagtccagccttccaggtggcgtgagaggcaatgactcgttacctgccgcccatcaccttggaggccttccctggccttgagtagaaaagtcggggatcggggcaagagaggctgagtacggatgggaaactattgtgcacaagtctttccagaggagtttcttaatgagatatttgtatttatttccagaccaataaatttgtaactttgcagcggaaaaaaaaaaaaaaaaaaaaaaaaaaaaaaaaaaaaaaaaaa

SEQ ID NO: 57 - DNA, 3938 bp, Homo sapiens
gtactggcccgcgccgtccgcccgccgacagctccctgagccagcccgggaggcagccgcgcgcagcgagccggtggcgcaggtgtcggggtcctcgagcgcccagcctgggagcatgattgtggacaagctgctggacgacagccgcggcggagaggggctgcgggacgcggcgggcggctgcggcctcatgaccagcccgctcaacctgagctacttctacggcgcgtcgccgcccgccgccgccccgggcgcctgcgacgccagctgctcggtcttgggcccctcggcgcccggctcgcccggctccgactcctccgacttctcctctgcctcgtcggtgtcctcctgcggcgccgtggagtcccggtcgagaggcggcgcccgcgccgagcgccagccagttgagccccatatgggggttggcaggcagcagagaggcccctttcaaggtgttcgggtaaagaactcagtgaaggaactcctgttgcacatccgaagtcataaacagaaggcttctggccaagctgtggatgattttaagacacaaggtgtgaacatagaacagttcagagaattgaagaacacagtatcatacagtgggaaaaggaaagggcccgattcgttgtctgatggacctgcttgcaaaaggccagctctgttgcattcccaatttttgacaccacctcaaacaccaacgcccggggagagcatggaagatgttcatctcaatgaacccaaacaggagagcagtgctgatctgcttcagaacattatcaacattaagaatgaatgcagccccgtttccctgaacacagttcaagttagctggctgaaccccgtggtggtccctcagagctcccccgcagagcagtgtcaggacttccatggagggcaggtcttttctccacctcagaaatgccaaccattccaagtcaggggctcccaacaaatgatagaccaggcttccctgtaccagtattctccacagaaccagcatgtagagcagcagccacactacacccacaaaccaactctggaatacagtccttttcccatacctccccagtcccccgcttatgaaccaaacctctttgatggtccagaatcacagttttgcccaaaccaaagcttagtttcccttcttggtgatcaaagggaatctgagaatattgctaatcccatgcagacttcctccagtgttcagcagcaaaatgatgctcacttgcacagcttcagcatgatgcccagcagcgcctgtgaggccatggtggggcacgagatggcctctgactcttcaaacacttcactgccattctcaaacatgggaaatccaatgaacaccacacagttagggaaatcactttttcagtggcaggtggagcaggaagaaagcaaattggcaaatatttcccaagaccagtttctttcaaaggatgcagatggtgacacgttccttcatattgctgttgcccaagggagaagggcactttcctatgttcttgcaagaaagatgaatgcacttcacatgctggatattaaagagcacaatggacagagtgcctttcaggtggcagtggctgccaatcagcatctcattgtgcaggatctggtgaacatcggggcacaggtgaacaccacagactgctggggaagaacacctctgcatgtgtgtgctgagaagggccactcccaggtgcttcaggcgattcagaagggagcagtgggaagtaatcagtttgtggatcttgaggcaactaactatgatggcctgactccccttcactgtgcagtcatagcccacaatgctgtggtccatgaactccagagaaatcaacagcctcattcacctgaagttcaggagcttttactgaagaataagagtctggttgataccattaagtgcctaattcaaatgggagcagcggtggaagcgaaggatcgcaaaagtggccgcacagccctgcatttggcagctgaagaagcaaatctggaactcattcgcctctttttggagctgcccagttgcctgtcttttgtgaatgcaaaggcttacaatggcaacactgccctccatgttgctgccagcttgcagtatcggttgacacaattagatgctgtccgcctgttgatgaggaagggagcagacccaagtactcggaacttggagaacgaacagccagtgcatttggttcccgatggccctgtgggagaacagatccgacgtatcctgaagggaaagtccattcagcagagagctccaccgtattagctccattagcttggagcctggctagcaacactcactgtcagttaggcagtcctgatgtatctgtacatagaccatttgccttatattggcaaatgtaagttgtttctatgaaacaaacatatttagttcactattatatagtgggttatattaaaagaaaagaagaaaaatatctaatttctcttggcagatttgcatatttcatacccaggtatctgggatctagacatctgaatttgatctcaatggtaacattgccttcaattaacagtagcttttgagtaggaaaggactttgatttgtggcacaaaacattattaatatagctattgacagtttcaaagcaggtaaattgtaaatgtttctttaagaaaaagcatgtgaaaggaaaaaggtaaatacagcattgaggcttcatttggccttagtccctgggagttactggcgttggacaggcttcagtcattggactagatgaaaggtgtccatggttagaatttgatctttgcaaactgtatataattgttatttttgtccttaaaaatattgtacatacttggttgttaacatggtcatatttgaaatgtataagtccataaaatagaaaagaacaagtgaattgttgctatttaaaaaaattttacaattcttactaaggagtttttattgtgtaatcactaagtctttgtagataaagcagatggggagttacggagttgttcctttactggctgaaagatatattcgaattgtaaagatgctttttctcatgcattgaaattatacattatttgtagggaattgcatgcttttttttttttttctcccgagacagggtcttgctctggcgcccaggctggagtacagtggcatgatcttggctcacttcagccttgacttgggctcaagtgatcctcctacctgagccttctgagtaactggaactacaggtgtgcactcctcgcctggctaattttttattttttgtacaggcaggatcttgccaccttgcccaggctggtcttgaactcctgagctcatgccatctgcctgccttagtctcccaaaatgctgggattacaggagtgagccaccatgcccggctggcagttgcatggaagagaacacctctttatggcttaccctctagaatttctaatttatgtgttctgttgaaatttttgtttttttacctttattgaaacaacaaaaagtcagtattgaaacatatcttcctgttttctgttgtcaaatgatgataatgtgccatgatgttttatatatatcattcagaaaaagttttattttttaataacattctattaacattattttgcttgccgctggcatgcctgaggaatgtatttggctttgattacacactaagtttttgtaataaatttgactcattaaaaaccttttttttttaaaaaaaaaaaaaaagaaaatctcattagtgaacttatctttgcagctgagtacttaaattctttttaaaaagataccctttggattgatcacattgtttgacccagtatgtcttgtagacacgttagttataatcaccttgtatctctaaatatggtgtgatatgaaccagtccattcacattggaaaaactgatggttttaaataaactaattcactaataaaaaaaaaaaaaaaa

SEQ ID NO: 58 - DNA, 2204 bp, Homo sapiens
gggtgcgtgtggagaggcccaggtgaggagcaagcgcccgcgttccggaagcccgctcccggggccatgggggcacaggtgaggctgccgcccggagagccctgccgagaaggatatgtgctgtctctggtctgtccaaactcctcccaggcttggtgtgagatcacaaatgtgtcacagctgctggcttctcctgtgctctacacggacctgaattacagcataaacaacttgagcatttcagcaaatgtagaaaacaaatacagtctttatgtgggcttggtactggcagtaagctcaagtatttttattggctccagcttcatactgaaaaagaagggcctcttgcaactggccagcaagggctttactagagctggacaaggtggacattcttacctgaaggaatggctctggtgggtaggattgctgtcaatgggagcaggagaggctgcaaattttgctgcttatgcttttgcacctgccaccttggtcacccctctgggtgctttgagtgttctcataagtgcaatattatcttcctactttttaaacgagcacttgaacattcatgggaaaataggctgcatattaagtatattggggtcaactgtgatggttatccatgccccacaagaagaggaagtcacatctttgcatgaaatggaaatgaaattgagagacccagggtttatttcctttgctgtgatcataactgtgatctccttggtgctgattttgattgtggctcccaagaaaggacagaccaatatattggtttatatttcaatctgttccttgattggagcgttttcagtttcttctgtgaaaggcctgggaattgccattaaggagctgatagaatggaagccagtttacaaacatccgctggtctttgttttgctggctgtacttgtgctttcagtaactacacagattaactatctcaacaaggcactggacacctttaatacctctcttgtgacacccatttattatgtattcttcacatccatggtagtgacttgctctgccatcttattccaagagtggtatggcatgacagctggagatatcattgggaccctgagtggattcttcactattatcattggcatcttccttctacatgcttttaaaaatactgacattacttggagtgagcttacatccactgctaagaaagaagccgtctctctgaatgtcaatgaaaacaattatgttttactagagaacttggagtgttcagccccaggatacaatgatgacgttaccttgtttagtagaactgatgactgaagtctctagaaacactgagttttaaccaatatgagacacacgaagaggaaaatgaatgcttgcttcttggaagaactgctaggaaagttagcatttttgcagttctaactaatttagatgtgaggccaagtaaaaatgccatttttttggccattgaatttgaaaatcaaattgattatcctccagaatttctacaaactttgaaatactctctaaggatcaaagaagtcaaagagctatgtgtgtctcagaataatctccttcttctggtcacagtatctttgtctctgccaggtggctcttcatttctttggtagctatttttagacttacagtcattcaccaatatacagttagcagtgttccgatagacacagtatcagtcatattctccgttgagtcataatttcaaactcaacaagatttcagaaaggtataatcatgtaatttctcatattaaaactgagaagagaggccaggcatggtggttcacacctgtaatcctagcagtttgggaggccaaggcggacagatcacttgagctcaggagttcgagaccaccttgggccacaaggcgagaccctgtctctacaaaaaatacaaaaattagccaggcgtggtggcacatgcctgtagttccagccacccgggagcctgaggtgggaggattgcttgagtctgcgaggttggggctgccgtgagcccagattgcgccattgtgctccagcctgggtgacaaagcaaggccctgtctcaaaaaagaagaagagaaagggccaggggcttttgctttaaaaaactttttttaaaacagaagtgaaaccacgggtgctttgttcttccttctgcacctccttcttaaactagatagctaattagttattttaagaaaaaaaaaaaaaaaa

SEQ ID NO: 59 - DNA, 3547 bp, Homo sapiens
gcactcgcccggctcgcccgctttcgcacccagttcacgcgccacagctatgtgtccccgagccgcgcgggcgcccgcgacgctactcctcgccctgggcgcggtgctgtggcctgcggctggcgcctgggagcttacgattttgcacaccaacgacgtgcacagccggctggagcagaccagcgaggactccagcaagtgcgtcaacgccagccgctgcatgggtggcgtggctcggctcttcaccaaggttcagcagatccgccgcgccgaacccaacgtgctgctgctggacgccggcgaccagtaccagggcactatctggttcaccgtgtacaagggcgccgaggtggcgcacttcatgaacgccctgcgctacgatgccatggcactgggaaatcatgaatttgataatggtgtggaaggactgatcgagccactcctcaaagaggccaaatttccaattctgagtgcaaacattaaagcaaaggggccactagcatctcaaatatcaggactttatttgccatataaagttcttcctgttggtgatgaagttgtgggaatcgttggatacacttccaaagaaaccccttttctctcaaatccagggacaaatttagtgtttgaagatgaaatcactgcattacaacctgaagtagataagttaaaaactctaaatgtgaacaaaattattgcactgggacattcgggttttgaaatggataaactcatcgctcagaaagtgaggggtgtggacgtcgtggtgggaggacactccaacacatttctttacacaggcaatccaccttccaaagaggtgcctgctgggaagtacccattcatagtcacttctgatgatgggcggaaggttcctgtagtccaggcctatgcttttggcaaatacctaggctatctgaagatcgagtttgatgaaagaggaaacgtcatctcttcccatggaaatcccattcttctaaacagcagcattcctgaagatccaagcataaaagcagacattaacaaatggaggataaaattggataattattctacccaggaattagggaaaacaattgtctatctggatggctcctctcaatcatgccgctttagagaatgcaacatgggcaacctgatttgtgatgcaatgattaacaacaacctgagacacacggatgaaatgttctggaaccacgtatccatgtgcattttaaatggaggtggtatccggtcgcccattgatgaacgcaacaatggcacaattacctgggagaacctggctgctgtattgccctttggaggcacatttgacctagtccagttaaaaggttccaccctgaagaaggcctttgagcatagcgtgcaccgctacggccagtccactggagagttcctgcaggtgggcggaatccatgtggtgtatgatctttcccgaaaacctggagacagagtagtcaaattagatgttctttgcaccaagtgtcgagtgcccagttatgaccctctcaaaatggacgaggtatataaggtgatcctcccaaacttcctggccaatggtggagatgggttccagatgataaaagatgaattattaagacatgactctggtgaccaagatatcaacgtggtttctacatatatctccaaaatgaaagtaatttatccagcagttgaaggtcggatcaagttttccacaggaagtcactgccatggaagcttttctttaatatttctttcactttgggcagtgatctttgttttataccaatagccaaaaattctccttgcctttaatgtgtgaaactgcattttttcaagtgagattcaaatctgccttttaggacctggctttgtgacagcaaaaaccatctttacaggctcctagaagctgaaggttagagcattataaaatgaagagacagacatgattactcagggtcagcaacctagtgagttagaaaaaaaattaacatagggccctataaggagaaagccaactatgttaagtttacgtgtccaaattttaatgaaattttactaacaattttaaaccatatttttcttcttcatatccatttctaatccatcaaacagcttatgtttacataaaattttatcattcacaaggaagttttaagcacactgtctcatttgatatccacaacttatttttggtaggaaagagagatgtttttcccacctgtcagatgaaaaaactgaagctcaaaaagggttgacttgaccatacagctaatgctgacagatccaagacctagacctaggtcttttgaactcaagtccagcattctcaactatatcaagttactgttcagaatacttaatatctcctctcttcataattatcaatagccccaagctcatggatgacaaatctctgctttatttcttgtctctattttttcactttatagctcctgttataatagcaagtttaatggtataaacacaggataccatcctctcttgcaacacccatgtgcctttgatgagtcaggtagcaagctgtagtagataatgagaaaggccagaggctgcaaagacagtcaaaggacacgagagaaaggaaggggaagaacaggactccaggactgttttatattatagaaaagcaagagctaaagagcatttacacatgttaaacagatacttgttaagcatagtgcctgacacacggcattagctgttattttatgagattccatcagctctgcctctgtcctctttcttctaacatgaaggtatcatgagaagagaaccttctaacataagctgtaattctaaacctgcacttgtccctctccagcaagaggctagcactgaattcattctactcatactacacacccagttatggaatgtccagagttctcgaagaaaataaatgactttaggaagaggtatacattttttaagtcgctctgcctccaaatctgaacagtcactgtaaatcattcttaagcccagatatgagaacttctgctggaaagtgggaccctctgagtgggtggtcagaaaatacccatgctgatgaaatgacctatgcccaaagaacaaatacttaacgtgggagtggaaccacatgagcctgctcagctctgcataagtaattcaagaaatgggaggcttcaccttaaaaacagtgtgcaaatggcagctagaggttttgataggaagtatgtttgtttcttagtgtttacaaatattaagtactcttgatacaaaatatacttttaaacttcataacctttttataaaagttgttgcagcaaaataatagcctcggttctatgcatatatggattgctataaaaaatgtcaataagattgtacaaggaaaattagagaaagtcacatttagggtttattttttacacttggccagtaaaatagggtaaatcctattagaaattttttaaagaactttttttaagtttcctaaatctgtgtgtgtattgtgaagtggtataagaaatgactttgaaccactttgcaattgtagattcccaacaataaaattgaagat

SEQ ID NO: 60 - DNA, 4525 bp, Homo sapiens
ttggcccgtgcgtggggctggggtggagggcgggacagaggggctgggcccaggcaaagcttctgtcgctgctgctgcggaggccgaggacaggacgtgggctgggccgggcagtgccggactcggaggagcaggaggcgaggtccgccggagctctgagcccccgctgctctgccgcgcggtgaccccgcgccccggcgccgtccgacccgtggctgttccgagacgattggtgggggcgcggcggcggcggcggcggctgttgggggtggggagacgcgcggcgaggagacgagcgaggtcagcgagtttgagggaggaccgcgagccgctgccgccgtcatgtccgaggactcgagcgccctgccctggtccatcaacagggacgattacgagctgcaggaggtgatcgggagtggagcaactgctgtagtccaagcagcttattgtgcccctaaaaaggagaaagtggcaatcaaacggataaaccttgagaaatgtcaaactagcatggatgaactcctgaaagaaattcaagccatgagtcaatgccatcatcctaatattgtatcttactacacatcttttgtggtaaaagatgagctgtggcttgtcatgaagctgctaagtggaggttctgttctggatattattaagcacattgtggcaaaaggggaacacaaaagtggagtcctagatgaatctaccattgctacgatactccgagaagtactggaagggctggaatatctgcataaaaatggacagatccacagagatgtgaaagctggaaacattcttcttggagaagatggctcagtacagattgcagactttggggttagtgcttttttagcaactggtggtgatattacccgaaataaagtgagaaagacctttgttggcaccccttgttggatggcacctgaagttatggaacaggtccgtggttatgatttcaaagctgatatttggagttttggaattacagcaattgaattggctacaggggcggctccttatcataaatatccaccaatgaaggttttaatgctgacactgcagaacgatcctccttctttggaaactggtgttcaagataaagaaatgctgaaaaaatatggaaaatcatttagaaaaatgatttcattgtgccttcaaaaagatccagaaaaaagaccaacagcagcagaactattaaggcacaaatttttccagaaagcaaagaataaagaatttcttcaagaaaaaacattgcagagagcaccaaccatttctgaaagagcaaaaaaggttcggagagtaccaggttccagtgggcgtcttcataagacagaggatggaggctgggagtggagtgatgatgaatttgatgaagaaagtgaggaagggaaagcagcaatttcacaactcaggtctccccgagtgaaagaatcaatatcaaattctgagctctttccaacaactgatcctgtgggtactttgctccaagttccagaacagatctctgctcatctacctcagccagctgggcagattgctacacagccaactcaagtctctctcccacccaccgcagagccagcaaaaacagctcaggctttgtcttcaggatcaggttcacaagaaaccaagatcccaatcagtctagtactaagattaaggaattccaaaaaagaactaaatgatattcgatttgaatttactcctgggagagatacagcagagggtgtctctcaggaactcatttctgctggcctggtcgacggaagggatttagtaatagtggcagctaatttgcagaaaattgtggaagaacctcagtcaaatcgatctgtcactttcaaactggcatctggtgtcgaaggctcagatattcctgatgatggtaaactgataggatttgcccagctcagcatcagctaaaccacaaccctggaagaggcggcctaaggagattccacacatgcgtatctctgttgcttctattggcctaaacccactactgccaaagaacccagcaacaaacctcccggctaggagctttagaagtctttatgttcttcctgccatcattcctccttttcccacagggaaagaaaagttggatcactagtggccagcatccccagagttccgttagtaaacttacttcatatgtcccctgtcttcctccatctgagaagtggcccatgtgcttcaaggcccaggagggagatctgtcagctcattcttgccttactccaatgatggcccaggtggaaaagtagcagctgtatcgggcttcctcatcctgcctgttcccccacacctgccaggatatggacatcttgggatatctctttaccactgaagtagaattgattgttcagctggagcccagagaatttaatttaatgttttttctttgtacctgatgtgaattctagcaacctttgttaggaaaaagcacagcctcagatggaggcagcctaaactgtgttcttgttttgttcatggtgtttctaagcgttttgctgaagctgctctcaggcacccccttcttcattgctctctccagaaagggttgctagccttaacttcagctggtgcaaaacatctgactgtagccgaacttcagccatcagatccttcaaagtggaactttggattgtttttacagacaacatcgagtaatggcttgtaaatgtgaattttgccagaggtggtttttgaacaggaaaatcataattcatatcattggagaagtatttattttcaaatatcaaattgaagaaaaactcaatcctcccatgaaaatcagttcgcctggcctccaagtcgtgaggaaatgggtatgcaaggctgagatttctacagcaataaaggagacacacactgggccagagaggcctgccttctgcctgctctcctgcactgaccctttggagggggtctctgtgtgctgaagctaactcaagatggaaagtgaaaccacatgtgccgtgacctttaggttttatgagtagacagtgttcatttgattttctacagaaataatataaattattctttaggtttaaaaaagagcactcataatgcaatatgtgaataatcagtgaggttgatttttcttttttcctaccgtttcatagtctttgtctaactgctagtaaccctaccgagttttatatatgagtgggatactcaatctggccttaaaaagatacacaaagatgggctgtgggtccctggaaagggggagagttgccctttacagaatcactcgagccctttccagcactgttggtctgatgaacaaggttgttttaccttattttctcttggaacatatctgaaaaccttccccacaaataacttgtcacaccttttgtttcattctgagtctttagttttagtcatgggctttcttcacctgctctaggtgcaaaggcatgttgggaaagagatggatgttggggaggaagagaggagatggatttcagttgggagttaggaggagagtaggtgagatgatcagacaccggagttcaacgtcccagcagtcttggtaaaaggagggagcctgctgagccaggagggagaaaagaagattgaccagcttgctagaaaaatacttagcttttctttttctttttttgtggaggggggacggagaggaacaaggatggggaggtaggaatgaggtatagaaaagagatagcatcttctttggcacaagactagtggcttaccgcttaccttagagttttgttttttttttttcaaacccatcaaaatctacttatttatgaatccaaggggtggcagcatcactctgttctagcattctttgtggagatggtctggtgcctagctgggagtgagcagcagcccatcccctgttcactttctctagcccatcattacctgtgaactgcagtggggcagtcatggcaaatagaattgggctggggtttctccttcttttcagttcattgtttgccctgctaggaattagaagacagacaccatgtcccaggacagtgttacttcttctgcatgatgtgtggtagactccctttgctggcttgtgcagtgatactgagaaaatacatgaacagaaactgcccaggtggaacagcacgtaacctagtgagtgactgtactcctttctaggaatgctgattcagagtgcacctctttgactaggtcccaggatccccttgtccctggagtagggactaactatagcacaaagtaatatgtgccaatgctatttgtgaaatgtttggtctttctaaacgactaaaggatttgttgggtttttgcttaagttttgaaccaaatcctagagccagctgataatatttaataatctggaggagagaataatgatgtaccaataagtggagattcctccttatgatgtatgctaggttatggaagatgtaaaatattcaactttttcctcctttttttggactttgtattttactgcatgttttcttcatttttaatcaataaagagtaaattgtccttaaa

SEQ ID NO: 61 - DNA, 4593 bp, Homo sapiens
gctgccgcgccccgccctttctcggcccccggagggtgacggggtgaaggcgggggaaccgaggtggggagtccgccagagctcccagactgcgagcacgcgagccgccgcagccgtcacccgcgccgcgtcacggctcccgggcccgccctcctctgacccctcccctctctccgtttccccctctccccctcctccgccgaccgagcagtgacttaagcaacggagcgcggtgaagctcatttttctccttcctcgcagccgcgccagggagctcgcggcgcgcggcccctgtcctccggcccgagatgaatcctgcggcagaagccgagttcaacatcctcctggccaccgactcctacaaggttactcactataaacaatatccacccaacacaagcaaagtttattcctactttgaatgccgtgaaaagaagacagaaaactccaaattaaggaaggtgaaatatgaggaaacagtattttatgggttgcagtacattcttaataagtacttaaaaggtaaagtagtaaccaaagagaaaatccaggaagccaaagatgtctacaaagaacatttccaagatgatgtctttaatgaaaagggatggaactacattcttgagaagtatgatgggcatcttccaatagaaataaaagctgttcctgagggctttgtcattcccagaggaaatgttctcttcacggtggaaaacacagatccagagtgttactggcttacaaattggattgagactattcttgttcagtcctggtatccaatcacagtggccacaaattctagagagcagaagaaaatattggccaaatatttgttagaaacttctggtaacttagatggtctggaatacaagttacatgattttggctacagaggagtctcttcccaagagactgctggcataggagcatctgctcacttggttaacttcaaaggaacagatacagtagcaggacttgctctaattaaaaaatattatggaacgaaagatcctgttccaggctattctgttccagcagcagaacacagtaccataacagcttgggggaaagaccatgaaaaagatgcttttgaacatattgtaacacagttttcatcagtgcctgtatctgtggtcagcgatagctatgacatttataatgcgtgtgagaaaatatggggtgaagatctaagacatttaatagtatcaagaagtacacaggcaccactaataatcagacctgattctggaaaccctcttgacactgtgttaaaggttttggagattttaggtaagaagtttcctgttactgagaactcaaagggttacaagttgctgccaccttatcttagagttattcaaggggatggagtagatattaataccttacaagagattgtagaaggcatgaaacaaaaaatgtggagtattgaaaatattgccttcggttctggtggaggtttgctacagaagttgacaagagatctcttgaattgttccttcaagtgtagctatgttgtaactaatggccttgggattaacgtcttcaaggacccagttgctgatcccaacaaaaggtccaaaaagggccgattatctttacataggacgccagcagggaattttgttacactggaggaaggaaaaggagaccttgaggaatatggtcaggatcttctccatactgtcttcaagaatggcaaggtgacaaaaagctattcatttgatgaaataagaaaaaatgcacagctgaatattgaactggaagcagcacatcattaggctttatgactgggtgtgtgttgtgtgtatgtaatacataatgtttattgtacagatgtgtggggtttgtgttttatgatacattacagccaaattatttgttggtttatggacatactgccctttcattttttttcttttccagtgtttaggtgatctcaaattaggaaatgcatttaaccatgtaaaagatgagtgctaaagtaagctttttagggccctttgccaataggtagtcattcaatctggtattgatcttttcacaaataacagaactgagaaacttttatatataactgatgatcacataaaacagatttgcataaaattaccatgattgctttatgtttatatttaacttgtatttttgtacaaacaagattgtgtaagatatatttgaagtttcagtgatttaacagtctttccaacttttcatgatttttatgagcacagactttcaagaaaatacttgaaaataaattacattgccttttgtccattaatcagcaaataaaacatggccttaacaaagttgtttgtgttattgtacaatttgaaaattatgtcgggacataccctatagaattactaaccttactgccccttgtagaatatgtattaatcattctacattaaagaaaataatggttcttactggaatgtctaggcactgtacagttattatatatcttggttgttgtattgtaccagtgaaatgccaaatttgaaaggcctgtactgcaattttatatgtcagagattgcctgtggctctaatatgcacctcaagattttaaggagataatgtttttagagagaatttctgcttccactatagaatatatacataaatgtaaaatacttacaaaagtggaagtagtgtattttaaagtaattacacttctgaatttatttttcatattctatagttggtatgacttaaatgaattactggagtgggtagtgagtgtacttaaatgtttcaattctgttatattttttattaagtttttaaaaaattaaattggatattaaattgtatggacatcatttattaattttaaactgaatgccctcaataagtaatactgaagcacattcttaaatgaagataaattatctccaatgaaaagcatgacatgtgtttcaatagaagaatcttaagttggctaaattcaaagtgcttgacatcaaaatgttctagagtgattagctactagattctgaatcatacatcacatctgactagagaccagtttctttcgaatgattcttttatgtatgtagatctgttcttctgaggcagcggttggccaactatagcccaaaggccaaatttggacttctttttataaatgcagattgtctatggctgctttcccactactccagcctaaggtaaacagctgcaatagaagccaaatgagaatcgcaaagcccaaaatgtttattaacctgccctttacacaaaattacacaaaaagtttcctgatctctgttctaagaaaaggagtgtgccttgcatttaaaaggaaatgttggtttctagggaagggaggaggctaaataattgatacggaattttcctcttttgtcttcttttttctcacttaagaatccgatactggaagactgatttagaaaagtttttaacatgacattaaatgtgaaattttaaaaattgaaaagccataaatcatctgttttaaatagttacatgagaaaatgatcactagaataacctaattagaagtgttatcttcattaaatgttttttgtaagtggtattagaaagaatatgtttttcagatggttctttaaacatgtagtgagaacaataagcattattcacttttagtaagtcttctgtaatccatgatataaaataattttaaaatgattttttaatgtatttgagtaaagatgagtagtattaagaaaaacacacatttcttcacaaaatgtgctaaggggcgtgtaaagaatcaaaagaaactattaccaataatagttttgataatcacccataattttgtgtttaaacattgaaattatagtacagacagtattctctgtgttctgtgaatttcagcagcttcagaatagagtttaatttagaaatttgcagtgaaaaaagctatctctttgttcacaaccataaatcaggagatggagattaattctattggctcttagtcacttggaactgattaattctgactttctgtcactaagcacttggtatttggccatctccattctgagcaccaaacggttaacacgaatgtccactagaactctgctgtgtgtcacccttaaatcagtctaaatcttccagacaaaagcaaatggcatttatggatttaagtcattagattttcaactgacattaattaatccctcttgattgattatatcatcaagtatttatatcttaaataggaggtaggatttctgtgttaagactcttatttgtaccctataattaaagtaaaatgttttttatgagtatcccttgttttcccttcttaaattgttatcaaacaatttttataatgaaatctatcttggaaaattagaaagaaaaatggcaaggtatttattgttctgtttgccataatttagaactcacacttaagtattttgtagttttacattcctttttaacccattcagtggagaatgtcagcttttctcccaagttgtatgttaagtctattctaatatgtactcaacatcaagttataaacatgtaataaacatggaaataaagtttagctctattagtgaagtgttaaaaaaaaaaaaaa

SEQ ID NO: 62 - DNA, 2110 bp, Homo sapiens
gttcccctggaaggcgacccggacccgagccccggaaactcctctcctctacccagggcgatcgcccaaggagccctggctgcctgactactgccgacgctcacagggcgctgcgaggccatcccccgcgtcccgcttctccccggcccgcgggactctctgctaacagcctcagaaagtgaggacgggggcgcggaggcgggggcagcctccaggcagtgctgcctctcggttcttgggaattagcccgggggattcgcgctgggctccgagagcccgcagaaccagcgtcgtgtcctgggcgagctgggaggccggggccgagtcccgcgagtcccgcgagtgtgcctcccccggacgcctaggtaaacaactgagcgcacagaggccgagaggacatcgtgtcttcccacgcatattcgctcacggtcactaagtagctcttcttggaaagagggcgattgttaaagcaatagtgcgactgtcgggcttgccacgggtggagaggcggacccacgtcaggtcgcatctcgcctgcttttctcgaccccgaccgcaggcgctaacccgtcttcggctttcttcttgacccgtacggtttgcaacgtctcttaaaacagtaactcaactctctacaaaccggggtaatatccggtgctgagatcccacactgcaaggcgcagttccaaacgtctggtcggcctcgcaggtccctctttccaaggcctagccagatcttggttttggaatctcatttatctgtgacccggggaatgcaatacccccagctccctcctactcctacatttaaacaatgcctatagaagccgcttcctgggaagtaaggcataaccgagacctagcctcccggtagggaagttcatccgtttagtaaacagccccaactacgtgcggaccctcacggggatacgaagaattcaaccagggctggacaagtcagagtgggccaaggtaagagttacggctgctactgtgcccacgttggaacagatagattagttcatctgctagttgtgtggcaagagcaaagaattcaagaggggaagagaaagtgagaggagcttagagagctaagcaagaatcgaatcctttgtgtgtcatggtaagaaattcgaacttaataccaaggtagtcagaacaaaggacaacttttatacacgagggcgtcctgaatattcatctaagaaacaatgtctgatcaaacgggacaatccagccagcaatcctgagtcccaccggattatgtttggccagctttctagccttcacattgttaatttattagcaatcttttcaggagaaaggcaattattaaaattatgtggacttctagtaaaattatctcgaagatttacaattatgtataccaataacaaaaaaactacatgttttctgctcccctgcctttgtaggacaagtgagcattccagagaatttctacatgaccagctgttcattcttttaagaggatgacattcttcagctcatctggaaaggatacttcctttaagtctgttattcacagtctccaagggcaggtgtagttgggaaagacatttcatatggaaaaacaaacttgatagggtaaaaaaaaaaaaaaaatgagatgtaatctggaggcccaagtcattttcttaggagaaactcaaatgtgtttggtgttatctaaccttctgcagtttatcagtctgaaacaaatgcattctattctcatttgaaaatgtctgaacagccaccaattttcaaaatcacccatttaactagagactttaaagcccagaatttgcagttacgtatttcagaatgatttagtaattttgtgagcagctcagaggttaagtctacaatgtctgactacggtgcattattgaaaatatcagtagtgtaaggatcccgtagattggtgataactttgctcttaatttgttatttcaacagttaccaccaacagttggtgacttaacaaattaagagcatagttgccatatgctcatatttggcaaatatgtcaaaatggccatatttgccaatttttaagacaataaattcacagaaaatgcattacagaaaataacttaaaaaaaaaaag

SEQ ID NO: 63 - DNA, 937 bp, Homo sapiens
agagccggcgccgtcaccgcccgcattgccgctcccagtcccgcgctcggcacgacatgaaatcccccgacgaggtgctacgcgagggcgagttggagaagcgcagcgacagcctcttccagctatggaagaagaagcgcggggtgctcacctccgaccgcctgagcctgttccccgccagcccccgcgcgcgccccaaggagctgcgcttccactccatcctcaaggtggactgcgtggagcgcacgggcaagtacgtgtacttcaccatcgtcaccaccgaccacaaggagatcgacttccgctgcgcgggcgagagctgctggaacgcggccatcgcgctggcgctcatcgatttccagaaccgccgcgccctgcaggactttcgcagccgccaggaacgcaccgcacccgccgcacccgccgaggacgccgtggctgccgcggccgccgcaccctccgagccctcggagccctccaggccatccccgcagcccaaaccccgcacgccatgagcccgccgcgggccatacgctggacgagtcggaccgaggctaggacgtggccggcgctctccagccctgcagcagaagaacttcccgtgcgcgcggatcctcgctccgttgcacgggcgccttaagttattggactatctaatatctatgtatttatttcgctggttctttgtagtcacatattttatagtcttaatatcttgtttttgcatcactgtgcccattgcaaataaatcacttggccagtttgcttttctaccatccggctgtggctcagtgagactcctgctgggagggtggaggcccaggaatgggcgggcaggacaccctcatccagtcctgcggggctggtgtgaaaggcgctgggaaccggctttgaatgaataaatgaatcgtgtcatctgcaaaaaaaaaaaaaaaaa

SEQ ID NO: 64 - DNA, 623 bp, Homo sapiens
aggccaagctggactgcataaagattggtatggccttagctcttagccaaacaccttcctgacaccatgagggccagcagcttcttgatcgtggtggtgttcctcatcgctgggacgctggttctagaggcagctgtcacgggagttcctgttaaaggtcaagacactgtcaaaggccgtgttccattcaatggacaagatcccgttaaaggacaagtttcagttaaaggtcaagataaagtcaaagcgcaagagccagtcaaaggtccagtctccactaagcctggctcctgccccattatcttgatccggtgcgccatgttgaatccccctaaccgctgcttgaaagatactgactgcccaggaatcaagaagtgctgtgaaggctcttgcgggatggcctgtttcgttccccagtgagagggagccggtccttgctgcacctgtgccgtccccagagctacaggccccatctggtcctaagtccctgctgcccttccccttcccacactgtccattcttcctcccattcaggatgcccacggctggagctgcctctctcatccactttccaataaagagttccttctgctccaaaaaaaaaaaaaaaaaaaaaaaaaaaa

SEQ ID NO: 65 - DNA, 5411 bp, Homo sapiens
ctcgcgcccagcgcagtcgctccgagcggccgcgagcagagccgcccagccctgccagctgcgccgggacgataaggagtcaggccagggcgggatgacactcattgattctaaagcatctttaatctgccaggcggagggggctttgctggtctttcttggactattccagagaggacaactgtcatctgggaagtaacaacgcaggatgccccctggggtggactgccccatggaattctggaccaaggaggagaatcagagcgttgtggttgacttcctgctgcccacaggggtctacctgaacttccctgtgtcccgcaatgccaacctcagcaccatcaagcagctgctgtggcaccgcgcccagtatgagccgctcttccacatgctcagtggccccgaggcctatgtgttcacctgcatcaaccagacagcggagcagcaagagctggaggacgagcaacggcgtctgtgtgacgtgcagcccttcctgcccgtcctgcgcctggtggcccgtgagggcgaccgcgtgaagaagctcatcaactcacagatcagcctcctcatcggcaaaggcctccacgagtttgactccttgtgcgacccagaagtgaacgactttcgcgccaagatgtgccaattctgcgaggaggcggccgcccgccggcagcagctgggctgggaggcctggctgcagtacagtttccccctgcagctggagccctcggctcaaacctgggggcctggtaccctgcggctcccgaaccgggcccttctggtcaacgttaagtttgagggcagcgaggagagcttcaccttccaggtgtccaccaaggacgtgccgctggcgctgatggcctgtgccctgcggaagaaggccacagtgttccggcagccgctggtggagcagccggaagactacacgctgcaggtgaacggcaggcatgagtacctgtatggcagctacccgctctgccagttccagtacatctgcagctgcctgcacagtgggttgacccctcacctgaccatggtccattcctcctccatcctcgccatgcgggatgagcagagcaaccctgccccccaggtccagaaaccgcgtgccaaaccacctcccattcctgcgaagaagccttcctctgtgtccctgtggtccctggagcagccgttccgcatcgagctcatccagggcagcaaagtgaacgccgacgagcggatgaagctggtggtgcaggccgggcttttccacggcaacgagatgctgtgcaagacggtgtccagctcggaggtgagcgtgtgctcggagcccgtgtggaagcagcggctggagttcgacatcaacatctgcgacctgccccgcatggcccgtctctgctttgcgctgtacgccgtgatcgagaaagccaagaaggctcgctccaccaagaagaagtccaagaaggcggactgccccattgcctgggccaacctcatgctgtttgactacaaggaccagcttaagaccggggaacgctgcctctacatgtggccctccgtcccagatgagaagggcgagctgctgaaccccacgggcactgtgcgcagtaaccccaacacggatagcgccgctgccctgctcatctgcctgcccgaggtggccccgcaccccgtgtactaccccgccctggagaagatcttggagctggggcgacacagcgagtgtgtgcatgtcaccgaggaggagcagctgcagctgcgggaaatcctggagcggcgggggtctggggagctgtatgagcacgagaaggacctggtgtggaagctgcggcatgaagtccaggagcacttcccggaggcgctagcccggctgctgctggtcaccaagtggaacaagcatgaggatgtggcccagatgctctacctgctgtgctcctggccggagctgcccgtcctgagcgccctggagctgctagacttcagcttccccgattgccacgtaggctccttcgccatcaagtcgctgcggaaactgacggacgatgagctgttccagtacctgctgcagctggtgcaggtgctcaagtacgagtcctacctggactgcgagctgaccaaattcctgctggaccgggccctggccaaccgcaagatcggccacttccttttctggcacctccgctccgagatgcacgtgccgtcggtggccctgcgcttcggcctcatcctggaggcctactgcaggggcagcacccaccacatgaaggtgctgatgaagcagggggaagcactgagcaaactgaaggccctgaatgacttcgtcaagctgagctctcagaagacccccaagccccagaccaaggagctgatgcacttgtgcatgcggcaggaggcctacctagaggccctctcccacctgcagtccccactcgaccccagcaccctgctggctgaagtctgcgtggagcagtgcaccttcatggactccaagatgaagcccctgtggatcatgtacagcaacgaggaggcaggcagcggcggcagcgtgggcatcatctttaagaacggggatgacctccggcaggacatgctgaccctgcagatgatccagctcatggacgtcctgtggaagcaggaggggctggacctgaggatgaccccctatggctgcctccccaccggggaccgcacaggcctcattgaggtggtactccgttcagacaccatcgccaacatccaactcaacaagagcaacatggcagccacagccgccttcaacaaggatgccctgctcaactggctgaagtccaagaacccgggggaggccctggatcgagccattgaggagttcaccctctcctgtgctggctattgtgtggccacatatgtgctgggcattggcgatcggcacagcgacaacatcatgatccgagagagtgggcagctgttccacattgattttggccactttctggggaatttcaagaccaagtttggaatcaaccgcgagcgtgtcccattcatcctcacctacgactttgtccatgtgattcagcaggggaagactaataatagtgagaaatttgaacggttccggggctactgtgaaagggcctacaccatcctgcggcgccacgggcttctcttcctccacctctttgccctgatgcgggcggcaggcctgcctgagctcagctgctccaaagacatccagtatctcaaggactccctggcactggggaaaacagaggaggaggcactgaagcacttccgagtgaagtttaacgaagccctccgtgagagctggaaaaccaaagtgaactggctggcccacaacgtgtccaaagacaacaggcagtagtggctcctcccagccctgggcccaagaggaggcggctgcgggtcgtggggaccaagcacattggtcctaaaggggctgaagagcctgaactgcacctaacgggaaagaaccgacatggctgccttttgtttacactggttatttatttatgacttgaaatagtttaaggagctaaacagccataaacggaaacgcctccttcatgcagcggcggtgctgggccccccgaggctgcacctggctctcggctgaggattgtcaccccaagtcttccagctggtggatctgggcccagcaaagactgttctcctcccgagggaaccttcttcccaggcctcccgccagactgcctgggtcctggcgcctggcggtcacctggtgcctactgtccgacaggatgccttgatcctcgtgcgacccaccctgtgtatcctccctagactgagttctggcagctccccgaggcagccggggtaccctctagattcagggatgcttgctctccacttttcaagtgggtcttgggtacgagaattccctcatctttctctactgtaaagtgattttgtttgcaggtaagaaaataatagatgactcaccacacctctacggctggggagatcaggcccagccccataaaggagaatctacgctggtcctcaggacgtgttaaagagatctgggcctcatgtagctcaccccggtcacgcatgaaggcaaaagcaggtcagaagcgaatactctgccattatctcaaaaatcttttttttttttttgagatggggtcttcctctgttgcccaggctggagtgcagtggtgcaatcttggctcactgtaacctccgcctcccaggttcaagtgattcttctgcctcagcctcctgagtagctgggattacaggtgtgcaccaccgtacccagctaatttttgtattttagtagagacgggggtttcaccatgttggctgggctggtctcgaactcctgacctcaggtgatccacccgcctgagcctcccaaagtgctgggattacaggcatgagccaccgcgcccggcccactctgccattgtctaagccacctctgaaagcaggttttaacaaaaggatgaggccagaactcttccagaaccatcacctttgggaacctgctgtgagagtgctgaggtaccagaagtgtgagaacgagggggcgtgctgggatctttctctctgactatacttagtttgaaatggtgcaggcttagtcttaagcctccaaaggcctggatttgagcagctttagaaatgcaggttctagggcttctcccagccttcagaagccaactaactctgcagatggggctaggactgtgggcttttagcagcccacaggtgatcctaacatatcaggccatggactcaggacctgcccggtgatgctgttgatttctcaaaggtcttccaaaactcaacagagccagaagtagccgcccgctcagcggctcaggtgccagctctgttctgattcaccaggggtccgtcagtagtcattgccacccgcggggcacctccctggccacacgcctgttcccagcaagtgctgaaactcactagaccgtctgcctgtttcgaaatggggaaagccgtgcgtgcgcgttatttatttaagtgcgcctgtgtgcgcgggtgtgggagcacactttgcaaagccacagcgtttctggttttgggtgtacagtcttgtgtgcctggcgagaagaatattttctatttttttaagtcatttcatgtttctgtctggggaaggcaagttagttaagtatcactgatgtgggttgagaccagcactctgtgaaaccttgaaatgagaagtaaaggcagatgaaaagaaagaaaaagcctttttatgttcttttatgttctcggctcaaaaagaaacaagggagtgtaggtttaaaaccaaaacaggagagaagacaaaccccgctccggctggagttagttagaaccagaactttattgtagcggatacactttctgacctatcatgagtatacacatctgcgaagggaaaccgcgcggcgaca

SEQ ID NO: 66 - DNA, 2684 bp, Homo sapiens
cccgagaggagtcggtggcagcggcggcggcgggaccggcagcagcagcagcagcagcagcagcaaccactagcctcctgccccgcggcgctgccgcacgagccccacgagccgctcaccccgccgttctcagcgctgcccgaccccgctggcgcgccctcccgccgccagtcccggcagcgccctcagttgtcctccgactcgccctcggccttccgcgccagccgcagccacagccgcaacgccacccgcagccacagccacagccacagccccaggcatagccttcggcacagccccggctccggctcctgcggcagctcctctgggcaccgtccctgcgccgacatcctggaggttgggatgctcttgtccaaaatcaactcgcttgcccacctgcgcgccgcgccctgcaacgacctgcacgccaccaagctggcgcccggcaaggagaaggagcccctggagtcgcagtaccaggtgggcccgctactgggcagcggcggcttcggctcggtctactcaggcatccgcgtctccgacaacttgccggtggccatcaaacacgtggagaaggaccggatttccgactggggagagctgcctaatggcactcgagtgcccatggaagtggtcctgctgaagaaggtgagctcgggtttctccggcgtcattaggctcctggactggttcgagaggcccgacagtttcgtcctgatcctggagaggcccgagccggtgcaagatctcttcgacttcatcacggaaaggggagccctgcaagaggagctggcccgcagcttcttctggcaggtgctggaggccgtgcggcactgccacaactgcggggtgctccaccgcgacatcaaggacgaaaacatccttatcgacctcaatcgcggcgagctcaagctcatcgacttcgggtcgggggcgctgctcaaggacaccgtctacacggacttcgatgggacccgagtgtatagccctccagagtggatccgctaccatcgctaccatggcaggtcggcggcagtctggtccctggggatcctgctgtatgatatggtgtgtggagatattcctttcgagcatgacgaagagatcatcaggggccaggttttcttcaggcagagggtctcttcagaatgtcagcatctcattagatggtgcttggccctgagaccatcagataggccaaccttcgaagaaatccagaaccatccatggatgcaagatgttctcctgccccaggaaactgctgagatccacctccacagcctgtcgccggggcccagcaaatagcagcctttctggcaggtcctcccctctcttgtcagatgcccgagggaggggaagcttctgtctccagcttcccgagtaccagtgacacgtctcgccaagcaggacagtgcttgatacaggaacaacatttacaactcattccagatcccaggcccctggaggctgcctcccaacagtggggaagagtgactctccaggggtcctaggcctcaactcctcccatagatactctcttcttctcataggtgtccagcattgctggactctgaaatatcccgggggtggggggtgggggtgggtcagaaccctgccatggaactgttttcttcatcatgagttctgctgaatgccgcgatgggtcaggtaggggggaaacaggttgggatgggataggactagcaccattttaagtccctgtcacctcttccgactctttctgagtgccttctgtggggactccggctgtgctgggagaaatacttgaacttgcctcttttacctgctgcttctccaaaaatctgcctgggttttgttccctatttttctctcctgtcctccctcaccccctccttcatatgaaaggtgccatggaagaggctacagggccaaacgctgagccacctgcccttttttctgcctcctttagtaaaactccgagtgaactggtcttcctttttggtttttacttaactgtttcaaagccaagacctcacacacacaaaaaatgcacaaacaatgcaatcaacagaaaagctgtaaatgtgtgtacagttggcatggtagtatacaaaaagattgtagtggatctaatttttaagaaattttgcctttaagttattttacctgtttttgtttcttgttttgaaagatgcgcattctaacctggaggtcaatgttatgtatttatttatttatttatttggttcccttcctattccaagcttccatagctgctgccctagttttctttcctcctttcctcctctgacttggggaccttttgggggagggctgcgacgcttgctctgtttgtggggtgacgggactcaggcgggacagtgctgcagctccctggcttctgtggggcccctcacctacttacccaggtgggtcccggctctgtgggtgatggggaggggcattgctgactgtgtatataggataattatgaaaagcagttctggatggtgtgccttccagatcctctctggggctgtgttttgagcagcaggtagcctgctggttttatctgagtgaaatactgtacaggggaataaaagagatcttatttttttttttatacttggcgttttttgaataaaaaccttttgtcttaaaaaaaaaaaaaaaaaaaaaaaaaaaaaaaaaaaaaaaaaaaa

SEQ ID NO: 67 - DNA, 1437 bp, Homo sapiens
cagggccgagccagccccttcaccaccagccggccgcgccccgggaagggaagtttgtggcggaggaggttcgtacgggaggagggggaggcgcccacgcatctggggctgactcgctctttcgcaaaacgtctgggaggagtccctggggccacaaaactgcctccttcctgaggccagaaggagagaagacgtgcagggaccccgcgcacaggagctgccctcgcgacatgggtcacccgccgctgctgccgctgctgctgctgctccacacctgcgtcccagcctcttggggcctgcggtgcatgcagtgtaagaccaacggggattgccgtgtggaagagtgcgccctgggacaggacctctgcaggaccacgatcgtgcgcttgtgggaagaaggagaagagctggagctggtggagaaaagctgtacccactcagagaagaccaacaggaccctgagctatcggactggcttgaagatcaccagccttaccgaggttgtgtgtgggttagacttgtgcaaccagggcaactctggccgggctgtcacctattcccgaagccgttacctcgaatgcatttcctgtggctcatcagacatgagctgtgagaggggccggcaccagagcctgcagtgccgcagccctgaagaacagtgcctggatgtggtgacccactggatccaggaaggtgaagaagggcgtccaaaggatgaccgccacctccgtggctgtggctaccttcccggctgcccgggctccaatggtttccacaacaacgacaccttccacttcctgaaatgctgcaacaccaccaaatgcaacgagggcccaatcctggagcttgaaaatctgccgcagaatggccgccagtgttacagctgcaaggggaacagcacccatggatgctcctctgaagagactttcctcattgactgccgaggccccatgaatcaatgtctggtagccaccggcactcacgaacgctcactctggggaagctggttgccatgtaaaagtactactgccctgagaccaccatgctgtgaggaagcccaagctactcatgtataaatgccatgtggagatagagccccagatgtttcagccatctcagcccaggcaccagacaagtgggtgaagaagccaccttggacatgtagccccagcagatgtgatatagagaagaaacaggaaacttggctatattagtttcctagggctgcctgtgataaattattacaaactttataaactaacacattgtgtgcctatatcaaaacatcatggaaggacaggcacagtggctcatgcctgtagtcctagcactttgggagggtgagaaaggaagatctcttgagctcaggagttcaagatcagcctgggcaacacagtgagacctcatctccactaaaaataaaaaaaaattggctgg

SEQ ID NO: 68 - DNA, 4788 bp, Homo sapiens
accgcccctagccccgcgctccggaagtgaagcggccagaccaccagctaatggatgcggagcggagggcccgctgaccgctctccgcgcctggagcagcttggcttggctggagctaagagccagacacaccactgtgtggaggtgggtgatgtcttcctgtgctaaaaggtgaataaataagctcctcacctctcgcggaacactcgggaacacatcaacaggggtccaagccgccctgctgggaggcttctcttcaagagttctgggtcccagagtggaaggcattttcccatcaactggagagagacgaaacatcagagaccaggaggctgtggagaaagcagctgtcccaggtgcctcaactatcagagaagggtcagcgtcacgtggctgccagcatctttgagaaaatcactggcaatcggacttcagagctgcgggcacaggtgtggttagaactgagatacgacctgcccacctgggtcaggcctaaagacaagaagtcctgagttcttgccactgagtaggccagggtcatttgtccagaaaactttgtgactgtctttgagtgacctagtctgggacccattcattggtgggttctaaggttagaagctcatccaggatattttcaatattaagtcagtgcatagctgcaccactaacaaattggtgcctgtagagtcagagtgggtcaattcttaggacaatggcgctggcactgttagaggactggtgcaggataatgagtgtggatgagcagaagtcactgatggttacggggataccggcggactttgaggaggctgagattcaggaggtccttcaggagactttaaagtctctgggcaggtatagactgcttggcaagatattccggaagcaggagaatgccaatgctgtcttactagagcttctggaagatactgatgtctcggccattcccagtgaggtccagggaaaggggggtgtctggaaggtgatctttaagacccctaatcaggacactgagtttcttgaaagattgaacctgtttctagaaaaagaggggcagacggtctcgggtatgtttcgagccctggggcaggagggcgtgtctccagccacagtgccctgcatctcaccagaattactggcccatttgttgggacaggcaatggcacatgcgcctcagcccctgctacccatgagataccggaaactgcgagtattctcagggagtgctgtcccagccccagaggaagagtcctttgaggtctggttggaacaggccacggagatagtcaaagagtggccagtaacagaggcagaaaagaaaaggtggctggcggaaagcctgcggggccctgccctggacctcatgcacatagtgcaggcagacaacccgtccatcagtgtagaagagtgtttggaggcctttaagcaagtgtttgggagcctagagagccgcaggacagcccaggtgaggtatctgaagacctatcaggaggaaggagagaaggtctcagcctatgtgttacggctagaaaccctgctccggagagcggtggagaaacgcgccatccctcggcgtattgcggaccaggtccgcctggagcaggtcatggctggggccactcttaaccagatgctgtggtgccggcttagggagctgaaggatcagggcccgccccccagcttccttgagctaatgaaggtaatacgggaagaagaggaggaagaggcctcctttgagaatgagagtatcgaagagccagaggaacgagatggctatggccgctggaatcatgagggagacgactgaaaaccacctgggggcaggacccacagccagtgggctaagacctttaaaaaatttttttctttaatgtatgggactgaaatcaaaccatgaaagccaattattgaccttccttccttccttccttccctcccttcctccttctctccttctctcctcctctctcctctcctctcctctctttccttccttccttccttttttctttttctctttcttctttatttcttgggtctcactctcatcacccaggctagagtgcagtggcacaaaaatctcggctcactgcagccttgacttcccaggctcaggctcaggtgatcctcacaccttagcctcccaagtacctgggactacaggcacgcaccaccatgcctagctattcttttgtatttttggtagagacagggttttgctgtgttgctcaggctggtctggaacccctaggctcaaatgatgtgcccaactcggcctcccaaagtgctgggattacaggcatgaaccgccatgcctggcccttgatttttctttttaagaaaaaaatatctaggagtttcttagaccctatgtagattattaatgaacaaaagattaaactccaaatattaaatagtaagcctgaaggaatctgaaacacttgtacttccaattttctttaaataatcccaaatagaccagaattggcccataccatagaagaaagaattggcagtcaaaaaaaaaaataccttttgtaatgtttgaaaaataaagctgtttgacttgtcaggtgttttcctttctcaaatcagcaaattctctctgagtgcctggctttgtgagacactgtacaaggagttacaagactacagctataacctgcagttgagcagttataaacctacaaaatgggccctgccctcagagaggttccagtctagatgaggagctgatctagacaggtaaaaggctaactaaccctttgtgtaaataagttcatcaccccagtaaaagtgtcatcacccagtgaataggaccacctctgcctgcagatttttgttgttgttgttgtcattgttgttgttgttttaacctgggaagtgttcttcctgcctttctgctaggtgtcagatagatggtcccagagctaggtgctgtgtcaggccctgaagacacagatgactcaacctaagctttactttccagaggtccacagcctgagaggtgtccccaaagaaagggggacatgaggggactgcatgcttgagagcagggttgtttagggcaggtttggatttagtgagcaggctggtttgcttagagaaggcttttagtggcaacaaaggatgaagaggagagaaaaggaactcacatttattgagggcctactgtgtgcaaagtgtttcatgtatatctcattgaatgtatacagccaccctgttgtggtataattttgctctttataaagagaaagaccgaagctcagatgagttaagtggtctcctcaacaccaaaatgccaagaagtgatggagcctagacagaagcccagaactttctgactcacactagtccatcctctaccatcacgatgactttcaaattgtgctctgcagttctgcagattttctagcagtgccatctccaaaatgtgttttaaactctttatttttttaattattattagtattattttgagactgagtcttgctctatcacccaggctggagtgcagtggtgcaatctcagctcactgcaacctccgcctcccaggttcaagcgatttcgtgcctcagcctcccgagtagctgggattacaggcacccaccaccacgcccagctaatttttgtatttttagtagaaatggggtttcaccatgttggccaggctggtctcgaactcctgacctcaagtgatccactcacctcggcctcccaaagtgctgggattacaggtgtgagccaccatgcctgggctaaactctttaagtctctagtaaatgcagctagattcaaatgggctgataaccaaattttaacacatcagcattcaccaccaggtttacttttattttcagattggctcattttgtgcagaccttagagcaaagtttcctttatggtatctgtgtacgtatccaaacttcttttaattgttcacagattttaaaagcggtagcaccacatggttgtgtagatcagacctgtgtatttagatcagacctgtgtatcacgtaagtgtgtgagtgcagtgcagatgagcaccatttagttatatgtgctaggcaaatctccaacacagttgatgtgtagtcttgtggtagatttgtgcatactgtaagcaaattgcttagcttctctagacatcagtttccacatctgaaaaataagaagatgagagtacacggttgttatgaacaaatgacttaatgctttttaagcacgttgcatgacatctggaacacagaaagccctcaatacattgaagctcttaggattttcacgatgttcctgtctgctcaatgcatgctttctttattgttctgacagttgtgtggtaacaagctaatatgcttccagttgacttccagtctaccctggtgttagaaaccgtttcatctcttattgtaaatttgagtgcttgttgttttttatatttgtgatgactcttccagcagttgttgacaattgttagaggtttgacttttaaataattacttattttttctgattgtggttcagtttaactgaagaatatcctgagattgtaagaaaagcattttttaaaaggtatcacttgtgatcatttatctttctaaattctatttttaatactgttccaccaaagtgatgcagtggttaccatgacaccctaatttcatgtgtttttgtatttatgaaaatagtttcattgtcatttattggcggtatacaaagtaaaatgttataaatgtgaagttataaaataaatatatgctaataaaatcctgagtttttctgtttcct

SEQ ID NO: 69 - DNA, 2399 bp, Homo sapiens
ataaaagcctagtggccattgtgttcgttgctcttatcggttcccatcccagttgttgatcttatgcaagacgctgcacgaccccgcgcccgcttgtcgccacggcacttgaggcagccggagatactctgagttactcggagcccgacgcctgagggtgagatgaacgcgctggcctccctaaccgtccggacctgtgatcgcttctggcagaccgaaccggcgctcctgcccccggggtgacgcgcagctcccagccgcccagacacatggccccaggccaagcaccccatcaggctaccccgtggagggatgcccaccctttcttcctcctgtccccagtgatgggcctcctcagccgcgcctggagccgcctgaggggcctgggacctctagagccctggctggtggaagcagtaaaaggagcagctctggtagaagctggcctggagggagaagctaggactcctctggcaatcccccataccccttggggcagacgccctgaagaggaggctgaagacagtggaggccctggagaggacagagaaacactggggctgaaaaccagcagttcccttcctgaagcctggggacttttggatgatgatgatggcatgtatggtgagcgagaggcaaccagtgtccctagagggcagggaagtcaatttgcagatggccagcgtgctcccctgtctcccagccttctgataaggacactgcaaggttctgataagaacccaggggaggagaaagccgaggaagagggagttgctgaagaggagggagttaacaagttctcttatccaccatcacaccgggagtgttgtccagccgtggaggaggaggacgatgaagaagctgtaaagaaagaagctcacagaacctctacttctgccttgtctccaggatccaagcccagcacttgggtgtcttgcccaggggaggaagagaatcaagccacggaggataaaagaacagaaagaagtaaaggagccaggaagacctccgtgtccccccgatcttcaggctccgaccccaggtcctgggagtatcgttcaggagaggcgtccgaggagaaggaggaaaaggcacacaaagaaactgggaaaggagaagctgccccagggccgcaatcctcagccccagcccagaggccccagctcaagtcctggtggtgccaacccagtgatgaagaggagggtgaggtcaaggctttgggggcagctgagaaggatggagaagctgagtgtcctccctgcatccccccaccaagtgccttcctgaaggcctgggtgtattggccaggagaggacacagaggaagaggaagatgaggaagaagatgaggacagtgactctggatcagatgaggaagagggagaagctgaggcttcctcttccactcctgctacaggtgtcttcttgaagtcctgggtctatcagccaggagaggacacagaggaggaggaagatgaggacagtgatacaggatcagccgaggatgaaagagaagctgagacttctgcttccacaccccctgcaagtgctttcttgaaggcctgggtgtatcggccaggagaggacacggaggaggaggaagatgaggatgtggatagtgaggataaggaagatgattcagaagcagccttgggagaagctgagtcagacccacatccctcccacccggaccagagggcccacttcaggggctggggatatcgacctggaaaagagacagaggaagaggaagctgctgaggactggggagaagctgagccctgccccttccgagtggccatctatgtacctggagagaagccaccgcctccctgggctcctcctaggctgcccctccgactgcaaaggcggctcaagcgcccagaaacccctactcatgatccggaccctgagactcccctaaaggccagaaaggtgcgcttctccgagaaggtcactgtccatttcctggctgtctgggcagggccggcccaggccgcccgccagggcccctgggagcagcttgctcgggatcgcagccgcttcgcacgccgcatcacccaggcccaggaggagctgagcccctgcctcacccctgctgcccgggccagagcctgggcacgcctcaggaacccacctttagcccccatccctgccctcacccagaccttgccttcctcctctgtcccttcgtccccagtccagaccacgcccttgagccaagctgtggccacaccttcccgctcgtctgctgctgcagcggctgccctggacctcagtgggaggcgtggctgagaccaactggtttgcctataatttattaactatttattttttctaagtgtgggtttatataaggaataaagccttttgatttgtagcgaaaaaaaaaaaaaaaaa

SEQ ID NO: 70 - DNA, 2751 bp, Homo sapiens
attaaagatgatttttacagtcaatgagccacgtcagggagcgatggcacccgcaggcggtatcaactgatgcaagtgttcaagcgaatctcaactcgttttttccggtgactcattcccggccctgcttggcagcgctgcaccctttaacttaaacctcggccggccgcccgccgggggcacagagtgtgcgccgggccgcgcggcaattggtccccgcgccgacctccgcccgcgagcgccgccgcttcccttccccgccccgcgtccctccccctcggccccgcgcgtcgcctgtcctccgagccagtcgctgacagccgcggcgccgcgagcttctcctctcctcacgaccgagagcagtcattatggcgaaccttggctgctggatgctggttctctttgtggccacatggagtgacctgggcctctgcaagaagcgcccgaagcctggaggatggaacactgggggcagccgatacccggggcagggcagccctggaggcaaccgctacccacctcagggcggtggtggctgggggcagcctcatggtggtggctgggggcagcctcatggtggtggctgggggcagccccatggtggtggctggggacagcctcatggtggtggctggggtcaaggaggtggcacccacagtcagtggaacaagccgagtaagccaaaaaccaacatgaagcacatggctggtgctgcagcagctggggcagtggtggggggccttggcggctacatgctgggaagtgccatgagcaggcccatcatacatttcggcagtgactatgaggaccgttactatcgtgaaaacatgcaccgttaccccaaccaagtgtactacaggcccatggatgagtacagcaaccagaacaactttgtgcacgactgcgtcaatatcacaatcaagcagcacacggtcaccacaaccaccaagggggagaacttcaccgagaccgacgttaagatgatggagcgcgtggttgagcagatgtgtatcacccagtacgagagggaatctcaggcctattaccagagaggatcgagcatggtcctcttctcctctccacctgtgatcctcctgatctctttcctcatcttcctgatagtgggatgaggaaggtcttcctgttttcaccatctttctaatctttttccagcttgagggaggcggtatccacctgcagcccttttagtggtggtgtctcactctttcttctctctttgtcccggataggctaatcaatacccttggcactgatgggcactggaaaacatagagtagacctgagatgctggtcaagccccctttgattgagttcatcatgagccgttgctaatgccaggccagtaaaagtataacagcaaataaccattggttaatctggacttatttttggacttagtgcaacaggttgaggctaaaacaaatctcagaacagtctgaaatacctttgcctggatacctctggctccttcagcagctagagctcagtatactaatgccctatcttagtagagatttcatagctatttagagatattttccattttaagaaaacccgacaacatttctgccaggtttgttaggaggccacatgatacttattcaaaaaaatcctagagattcttagctcttgggatgcaggctcagcccgctggagcatgagctctgtgtgtaccgagaactggggtgatgttttacttttcacagtatgggctacacagcagctgttcaacaagagtaaatattgtcacaacactgaacctctggctagaggacatattcacagtgaacataactgtaacatatatgaaaggcttctgggacttgaaatcaaatgtttgggaatggtgcccttggaggcaacctcccattttagatgtttaaaggaccctatatgtggcattcctttctttaaactataggtaattaaggcagctgaaaagtaaattgccttctagacactgaaggcaaatctcctttgtccatttacctggaaaccagaatgattttgacatacaggagagctgcagttgtgaaagcaccatcatcatagaggatgatgtaattaaaaaatggtcagtgtgcaaagaaaagaactgcttgcatttctttatttctgtctcataattgtcaaaaaccagaattaggtcaagttcatagtttctgtaattggcttttgaatcaaagaatagggagacaatctaaaaaatatcttaggttggagatgacagaaatatgattgatttgaagtggaaaaagaaattctgttaatgttaattaaagtaaaattattccctgaattgtttgatattgtcacctagcagatatgtattacttttctgcaatgttattattggcttgcactttgtgagtattctatgtaaaaatatatatgtatataaaatatatattgcataggacagacttaggagttttgtttagagcagttaacatctgaagtgtctaatgcattaacttttgtaaggtactgaatacttaatatgtgggaaacccttttgcgtggtccttaggcttacaatgtgcactgaatcgtttcatgtaagaatccaaagtggacaccattaacaggtctttgaaatatgcatgtactttatattttctatatttgtaactttgcatgttcttgttttgttatataaaaaaattgtaaatgtttaatatctgactgaaattaaacgagcgaagatgagcaccaaaaaaaaaaaaaaaa

SEQ ID NO: 71 - DNA, 4465 bp, Homo sapiens
caattgtcatacgacttgcagtgagcgtcaggagcacgtccaggaactcctcagcagcgcctccttcagctccacagccagacgccctcagacagcaaagcctacccccgcgccgcgccctgcccgccgctcggatgctcgcccgcgccctgctgctgtgcgcggtcctggcgctcagccatacagcaaatccttgctgttcccacccatgtcaaaaccgaggtgtatgtatgagtgtgggatttgaccagtataagtgcgattgtacccggacaggattctatggagaaaactgctcaacaccggaatttttgacaagaataaaattatttctgaaacccactccaaacacagtgcactacatacttacccacttcaagggattttggaacgttgtgaataacattcccttccttcgaaatgcaattatgagttatgtcttgacatccagatcacatttgattgacagtccaccaacttacaatgctgactatggctacaaaagctgggaagccttctctaacctctcctattatactagagcccttcctcctgtgcctgatgattgcccgactcccttgggtgtcaaaggtaaaaagcagcttcctgattcaaatgagattgtggaaaaattgcttctaagaagaaagttcatccctgatccccagggctcaaacatgatgtttgcattctttgcccagcacttcacgcatcagtttttcaagacagatcataagcgagggccagctttcaccaacgggctgggccatggggtggacttaaatcatatttacggtgaaactctggctagacagcgtaaactgcgccttttcaaggatggaaaaatgaaatatcagataattgatggagagatgtatcctcccacagtcaaagatactcaggcagagatgatctaccctcctcaagtccctgagcatctacggtttgctgtggggcaggaggtctttggtctggtgcctggtctgatgatgtatgccacaatctggctgcgggaacacaacagagtatgcgatgtgcttaaacaggagcatcctgaatggggtgatgagcagttgttccagacaagcaggctaatactgataggagagactattaagattgtgattgaagattatgtgcaacacttgagtggctatcacttcaaactgaaatttgacccagaactacttttcaacaaacaattccagtaccaaaatcgtattgctgctgaatttaacaccctctatcactggcatccccttctgcctgacacctttcaaattcatgaccagaaatacaactatcaacagtttatctacaacaactctatattgctggaacatggaattacccagtttgttgaatcattcaccaggcaaattgctggcagggttgctggtggtaggaatgttccacccgcagtacagaaagtatcacaggcttccattgaccagagcaggcagatgaaataccagtcttttaatgagtaccgcaaacgctttatgctgaagccctatgaatcatttgaagaacttacaggagaaaaggaaatgtctgcagagttggaagcactctatggtgacatcgatgctgtggagctgtatcctgcccttctggtagaaaagcctcggccagatgccatctttggtgaaaccatggtagaagttggagcaccattctccttgaaaggacttatgggtaatgttatatgttctcctgcctactggaagccaagcacttttggtggagaagtgggttttcaaatcatcaacactgcctcaattcagtctctcatctgcaataacgtgaagggctgtccctttacttcattcagtgttccagatccagagctcattaaaacagtcaccatcaatgcaagttcttcccgctccggactagatgatatcaatcccacagtactactaaaagaacgttcgactgaactgtagaagtctaatgatcatatttatttatttatatgaaccatgtctattaatttaattatttaataatatttatattaaactccttatgttacttaacatcttctgtaacagaagtcagtactcctgttgcggagaaaggagtcatacttgtgaagacttttatgtcactactctaaagattttgctgttgctgttaagtttggaaaacagtttttattctgttttataaaccagagagaaatgagttttgacgtctttttacttgaatttcaacttatattataagaacgaaagtaaagatgtttgaatacttaaacactatcacaagatggcaaaatgctgaaagtttttacactgtcgatgtttccaatgcatcttccatgatgcattagaagtaactaatgtttgaaattttaaagtacttttggttatttttctgtcatcaaacaaaaacaggtatcagtgcattattaaatgaatatttaaattagacattaccagtaatttcatgtctactttttaaaatcagcaatgaaacaataatttgaaatttctaaattcatagggtagaatcacctgtaaaagcttgtttgatttcttaaagttattaaacttgtacatataccaaaaagaagctgtcttggatttaaatctgtaaaatcagatgaaattttactacaattgcttgttaaaatattttataagtgatgttcctttttcaccaagagtataaacctttttagtgtgactgttaaaacttccttttaaatcaaaatgccaaatttattaaggtggtggagccactgcagtgttatctcaaaataagaatattttgttgagatattccagaatttgtttatatggctggtaacatgtaaaatctatatcagcaaaagggtctacctttaaaataagcaataacaaagaagaaaaccaaattattgttcaaatttaggtttaaacttttgaagcaaacttttttttatccttgtgcactgcaggcctggtactcagattttgctatgaggttaatgaagtaccaagctgtgcttgaataacgatatgttttctcagattttctgttgtacagtttaatttagcagtccatatcacattgcaaaagtagcaatgacctcataaaatacctcttcaaaatgcttaaattcatttcacacattaattttatctcagtcttgaagccaattcagtaggtgcattggaatcaagcctggctacctgcatgctgttccttttcttttcttcttttagccattttgctaagagacacagtcttctcatcacttcgtttctcctattttgttttactagttttaagatcagagttcactttctttggactctgcctatattttcttacctgaacttttgcaagttttcaggtaaacctcagctcaggactgctatttagctcctcttaagaagattaaaagagaaaaaaaaaggcccttttaaaaatagtatacacttattttaagtgaaaagcagagaattttatttatagctaattttagctatctgtaaccaagatggatgcaaagaggctagtgcctcagagagaactgtacggggtttgtgactggaaaaagttacgttcccattctaattaatgccctttcttatttaaaaacaaaaccaaatgatatctaagtagttctcagcaataataataatgacgataatacttcttttccacatctcattgtcactgacatttaatggtactgtatattacttaatttattgaagattattatttatgtcttattaggacactatggttataaactgtgtttaagcctacaatcattgatttttttttgttatgtcacaatcagtatattttctttggggttacctctctgaatattatgtaaacaatccaaagaaatgattgtattaagatttgtgaataaatttttagaaatctgattggcatattgagatatttaaggttgaatgtttgtccttaggataggcctatgtgctagcccacaaagaatattgtctcattagcctgaatgtgccataagactgaccttttaaaatgttttgagggatctgtggatgcttcgttaatttgttcagccacaatttattgagaaaatattctgtgtcaagcactgtgggttttaatatttttaaatcaaacgctgattacagataatagtatttatataaataattgaaaaaaattttcttttgggaagagggagaaaatgaaataaatatcattaaagataactcaggagaatcttctttacaattttacgtttagaatgtttaaggttaagaaagaaatagtcaatatgcttgtataaaacactgttcactgttttttttaaaaaaaaaacttgatttgttattaacattgatctgctgacaaaacctgggaatttgggttgtgtatgcgaatgtttcagtgcctcagacaaatgtgtatttaacttatgtaaaagataagtctggaaataaatgtctgtttatttttgtactattta

SEQ ID NO: 72 - DNA, 1331 bp, Homo sapiens
cctgcatctttttggaaggattctttttataaatcagaaagtgttcgaggttcaaaggtttgcctcggagcgtgtgaacattcctccgctcggttttcaactcgcctccaacctgcgccgcccggccagcatgtctccccgcccgtgaagcggggctgccgcctccctgccgctccggctgccactaacgacccgccctcgccgccacctggccctcctgatcgacgacacacgcacttgaaacttgttctcagggtgtgtggaatcaactttccggaagcaaccagcccaccagaggaggtcccgagcgcgagcggagacgatgcagcggagactggttcagcagtggagcgtcgcggtgttcctgctgagctacgcggtgccctcctgcgggcgctcggtggagggtctcagccgccgcctcaaaagagctgtgtctgaacatcagctcctccatgacaaggggaagtccatccaagatttacggcgacgattcttccttcaccatctgatcgcagaaatccacacagctgaaatcagagctacctcggaggtgtcccctaactccaagccctctcccaacacaaagaaccaccccgtccgatttgggtctgatgatgagggcagatacctaactcaggaaactaacaaggtggagacgtacaaagagcagccgctcaagacacctgggaagaaaaagaaaggcaagcccgggaaacgcaaggagcaggaaaagaaaaaacggcgaactcgctctgcctggttagactctggagtgactgggagtgggctagaaggggaccacctgtctgacacctccacaacgtcgctggagctcgattcacggaggcattgaaattttcagcagagaccttccaaggacatattgcaggattctgtaatagtgaacatatggaaagtattagaaatatttattgtctgtaaatactgtaaatgcattggaataaaactgtctcccccattgctctatgaaactgcacattggtcattgtgaatattttttttttgccaaggctaatccaattattattatcacatttaccataatttattttgtccattgatgtatttattttgtaaatgtatcttggtgctgctgaatttctatattttttgtaacataatgcactttagatatacatatcaagtatgttgataaatgacacaatgaagtgtctctattttgtggttgattttaatgaatgcctaaatataattatccaaattgattttcctttgtgcatgtaaaaataacagtattttaaatttgtaaagaatgtctaataaaatataatctaattacatcatga

SEQ ID NO: 73 - DNA, 5376 bp, Homo sapiens
agccggagctggagccgaggcggcggcgggacgcggccggccggacaaatttcctgctaggctgcggacagcgggcggcaggagccggcgcgagcggcttcaggaacccacggcctctgcgcgtccccgcgacccttcttcgcgcccggcgaagacagccgggcgccccggagggcggcgggcaggcgcccgggagatgcggagcctccgctgcagcgcgatctgcgcgaccagaccggcccccccgagactatagccttcactttccctcggtccaccatggagcccttgtgtccactcctgctggtgggttttagcttgccgctcgccagggctctcaggggcaacgagaccactgccgacagcaacgagacaaccacgacctcaggccctccggacccgggcgcctcccagccgctgctggcctggctgctactgccgctgctgctcctcctcctcgtgctccttctcgccgcctacttcttcaggttcaggaagcagaggaaagctgtggtcagcaccagcgacaagaagatgcccaacggaatcttggaggagcaagagcagcaaagggtgatgctgctcagcaggtcaccctcagggcccaagaagtattttcccatccccgtggagcacctggaggaggagatccgtatcagatccgccgacgactgcaagcagtttcgggaggagttcaactcattgccatctggacacatacaaggaacttttgaactggcaaataaagaagaaaacagagaaaaaaacagatatcccaacatccttcccaatgaccattctagggtgattctgagccaactggatggaattccctgttcagactacatcaatgcttcctacatagatggttacaaagagaagaataaattcatagcagctcaaggtcccaaacaggaaacggttaacgacttctggagaatggtctgggagcaaaagtctgcgaccatcgtcatgttaacaaacttgaaagaaaggaaagaggaaaagtgccatcagtactggcccgaccaaggctgctggacctatggaaacatccgggtgtgcgtggaggactgcgtggttttggtcgactacaccatccggaagttctgcatacagccacagctccccgacggctgcaaagcccccaggctggtctcacagctgcacttcaccagctggcccgacttcggagtgccttttacccccattgggatgctgaagttcctcaagaaagtaaagacgctcaaccccgtgcacgctgggcccatcgtggtccactgtagcgcgggcgtgggccggacgggcaccttcattgtgatcgatgccatgatggccatgatgcacgcggagcagaaggtggatgtgtttgaatttgtgtctcgaatccgtaatcagcgccctcagatggttcaaacggatatgcagtacacgttcatctaccaagccttactcgagtactacctctacggggacacagagctggacgtgtcctccctggagaagcacctgcagaccatgcacggcaccaccacccacttcgacaagatcgggctggaggaggagttcaggaaattgacaaatgtccggatcatgaaggagaacatgaggacgggcaacttgccggcaaacatgaagaaggccagggtcatccagatcatcccgtatgacttcaaccgagtgatcctttccatgaaaaggggtcaagaatacacagactacatcaacgcatccttcatagacggctaccgacagaaggactatttcatcgccacccaggggccactggcacacacggttgaggacttctggaggatgatctgggaatggaaatcccacactatcgtgatgctgacggaggtgcaggagagagagcaggataaatgctaccagtattggccaaccgagggctcagttactcatggagaaataacgattgagataaagaatgataccctttcagaagccatcagtatacgagactttctggtcactctcaatcagccccaggcccgccaggaggagcaggtccgagtagtgcgccagtttcacttccacggctggcctgagatcgggattcccgccgagggcaaaggcatgattgacctcatcgcagccgtgcagaagcagcagcagcagacaggcaaccaccccatcaccgtgcactgcagtgccggagctgggcgaacaggtacattcatagccctcagcaacattttggagcgagtaaaagccgagggacttttagatgtatttcaagctgtgaagagtttacgacttcagagaccacatatggtgcaaaccctggaacagtatgaattctgctacaaagtggtacaagattttattgatatattttctgattatgctaatttcaaatgaagattcctgccttaaaatattttttaatttaatggtcagtatattttgtaaaaatcatgttaatttatttcatagttgacattaatatcttccctaatttctttgtatatattttgttatgccttaaaggccacctgctatacagttgttaaatcttaaatatgctttttaaaaattggaataatgtattaaggtcaaataatatcccataaaatatatatttctgctaatattagtaaatatcttaatttttcattagattcatatcatttaatttcacatattcaacacctttaaatgttgtaatcttaatatgcgaagtgtgcctctgcaagatactaacacaaagctcatgttaagaaaacagttgaggactcagaagtcagttgaaaatgcactttcctaacagtgaattcacaaccctgaacagcagcatttttggaaggcaaactgttcgtgatggtacaatgtaaatggggacttctgtaaagttctcagtttcggtccatgtggtttatctttacattttaaagatcaaagaagtctttacaacctgaatccaggtctaaaacacactagagtagctggtgactataaataatattttaaaatgctgtgtctacaccatcaagactgtgtctacactatcttggctgaacgagaagagatgtaaatgctgggtggtcccgttgacccacggcgttgggtacaacaaaaccagccatcggagttacaccccaaagcaccatttgctgtccagctgcctgtcgtttggcccagaccaccctcagaaaaaaaccagctgcctctcccattctcccctcccgttctgccacagcggcctgggctggtccagtgctatgcctggaggctcaacacaaaacttcccatccaaacattcagatgaactgagcgtcttacacacgcagtacagaggagcacacattaggatagaaacagtagaataaccacgggcaattaaactttaaattttctgagcagcattttggtatttaaacatttcttgtaaaaagctgagacagtttgtaagaaaagaatccttaaaatctagatttataccattttttaaagtcccacctttcaatgtttaataaaacaaaaagagaaatccttaatctaaaagctaaattatttttgaatggaaatactactgagaccattgacactggataacagtaatgatcccattaccagataagattgactgacggggaaaaaaaaaaaaaaagaatggggtgtgaatgtaccaacactgaatcttacagcagttatctttctatggccattaggtacctagcagatgtgcacaatataaacaaaaagatatctggcctaccttactactaaaagcatttaacacgtgcatttttggtacttttttttttgttttctaaaagctacataaaggccttatttgacattttcactgataactgatcgcaccctcatgttgcagtgttcgtcccctattcattaacagtgtgtgcaaatgcaaccccaggacacattattgttctgatagatgctcacagggaatcaagcttctcgcccactccacggctctgagccccatccaagggcaagacttggtgcccagctggaaggacgaaagcacactttgtgaccgccatcctcaccagctgcatgcctgggctgcacactgctgaacgtgctcctctctccttctctgtacaatgattcagcatctcggcggaagaggaaaatggagctttttgaggctcgccaggtcccttttgttttcaccattaaaattccaaacccaaagcctttgtttgactgaaggagaagagagggaagtaagcttctgttcagcacctgaaccctagaaaaagagccagtttgctacgatgaaggtgacatttctctggtcatttatttgagagttcgaagtcaaagtcgaggggcaccggctttggttcatgtctaggagccctctgtcagaatccttgaagccctttaatggtctaactggcatctcttgtatcaagaagtacctttaaggtagaccttttcagggtgccctcaggaaagggccctgctcatgtttttttcctgtccccttagaccaaccccaggtgtccactgcaggggttctgcctgttcccaaactttttccattccaggaacaaaggagaagccactttccccaggacgcaagactctcccctccactgtccgggacagcgttcgccctttagcggggaggtcattacagcctcatggcctctaccaaggccccagatcacaggatctcctgggccttggagcacctcacgctgggggaatcaatccctgagggactcagaatcttctccgtgcaacctggaaagttcatctcttgtttccttcagtcaaagaaagtccattgtacataacaaaacagcccccaaacagcccagtgccgacaccattgttcctttcacactttcctttgttgcatgcagttgggttcaaatgccaaatagtgattagaagacgaccattctgatctgtgtgtgatctggtcactatgtgactgcctttacggtttctctccatgtgctatatgaatgaagaatgcataccagtgttttaaaaggtatttttatgtgtttttaaacacttttttaaatgagcctgacacctgtgtttcagcatttggagacatccccatgttattcttttaagtgtataattactgatacttttttgtttgtttgtttaactaagttgtgtttaacttatgtgcagtctttataatgtatgtatgttattacagtttcaactatcatattttctttgattacatttataatttgatcttgctctgattataatgccagtgaatgttgctgaactctttgtatatgcaaattgcaagatttaaaccattctgatgcaaggataaacctttactttgactaccagcctgtgtttttgtctttaaatctcttaatttcattcctctgcaaa

SEQ ID NO: 74 - DNA, 1908 bp, Homo sapiens
catttattaaggactctctgctccagcctctcactctcactctcctccgctcaaactcagctcacttgagagtctcctcccgccagctgtggaaagaactttgcgtctctccagcaatgcatctccttgcgattctgttttgtgctctctggtctgcagtgttggccgagaactcggatgattatgatctcatgtatgtgaatttggacaacgaaatagacaatggactccatcccactgaggaccccacgccgtgcgactgcggtcaggagcactcggaatgggacaagctcttcatcatgctggagaactcgcagatgagagagcgcatgctgctgcaagccacggacgacgtcctgcggggcgagctgcagaggctgcgggaggagctgggccggctcgcggaaagcctggcgaggccgtgcgcgccgggggctcccgcagaggccaggctgaccagtgctctggacgagctgctgcaggcgacccgcgacgcgggccgcaggctggcgcgtatggagggcgcggaggcgcagcgcccagaggaggcggggcgcgccctggccgcggtgctagaggagctgcggcagacgcgagccgacctgcacgcggtgcagggctgggctgcccggagctggctgccggcaggttgtgaaacagctattttattcccaatgcgttccaagaagatttttggaagcgtgcatccagtgagaccaatgaggcttgagtcttttagtgcctgcatttgggtcaaagccacagatgtattaaacaaaaccatcctgttttcctatggcacaaagaggaatccatatgaaatccagctgtatctcagctaccaatccatagtgtttgtggtgggtggagaggagaacaaactggttgctgaagccatggtttccctgggaaggtggacccacctgtgcggcacctggaattcagaggaagggctcacatccttgtgggtaaatggtgaactggcggctaccactgttgagatggccacaggtcacattgttcctgagggaggaatcctgcagattggccaagaaaagaatggctgctgtgtgggtggtggctttgatgaaacattagccttctctgggagactcacaggcttcaatatctgggatagtgttcttagcaatgaagagataagagagaccggaggagcagagtcttgtcacatccgggggaatattgttgggtggggagtcacagagatccagccacatggaggagctcagtatgtttcataaatgttgtgaaactccacttgaagccaaagaaagaaactcacacttaaaacacatgccagttgggaaggtctgaaaactcagtgcataataggaacacttgagactaatgaaagagagagttgagaccaatctttatttgtactggccaaatactgaataaacagttgaaggaaagacattggaaaaagcttttgaggataatgttactagactttatgccatggtgctttcagtttaatgctgtgtctctgtcagataaactctcaaataattaaaaaggactgtattgttgaacagagggacaattgttttacttttctttggttaattttgttttggccagagatgaattttacattggaagaataacaaaataagatttgttgtccattgttcattgttattggtatgtaccttattacaaaaaaaatgatgaaaacatatttatactacaaggtgacttaacaactataaatgtagtttatgtgttataatcgaatgtcacgtttttgagaagatagtcatataagttatattgcaaaagggatttgtattaatttaagactatttttgtaaagctctactgtaaataaaatattttataaaactaaaaaaaaaaaaaaaaaaaaaaaaaaaaaaaaaaaaa

SEQ ID NO: 75 - DNA, 3215 bp, Homo sapiens
cttgaagaagtgggtattccccttcccaccccaggcactggaggagcggccccccggggattccaggacctgagctccgggagctggactcgcagcgaccgcggcagagcgagctggcgccgggaagcgaggagacgcccgcgggaggcccagctgctcggagcaactggcatggcccgagccatggccgccgcgtggccgctgctgctggtggcgctactggtgctgtcctggccacccccaggaaccggggacgtcgtcgtgcaggcgcccacccaggtgcccggcttcttgggcgactccgtgacgctgccctgctacctacaggtgcccaacatggaggtgacgcatgtgtcacagctgacttgggcgcggcatggtgaatctggcagcatggccgtcttccaccaaacgcagggccccagctattcggagtccaaacggctggaattcgtggcagccagactgggcgcggagctgcggaatgcctcgctgaggatgttcgggttgcgcgtagaggatgaaggcaactacacctgcctgttcgtcacgttcccgcagggcagcaggagcgtggatatctggctccgagtgcttgccaagccccagaacacagctgaggttcagaaggtccagctcactggagagccagtgcccatggcccgctgcgtctccacagggggtcgcccgccagcccaaatcacctggcactcagacctgggcgggatgcccaatacgagccaggtgccagggttcctgtctggcacagtcactgtcaccagcctctggatattggtgccctcaagccaggtggacggcaagaatgtgacctgcaaggtggagcacgagagctttgagaagcctcagctgctgactgtgaacctcaccgtgtactaccccccagaggtatccatctctggctatgataacaactggtaccttggccagaatgaggccaccctgacctgcgatgctcgcagcaacccagagcccacaggctataattggagcacgaccatgggtcccctgccaccctttgctgtggcccagggcgcccagctcctgatccgtcctgtggacaaaccaatcaacacaactttaatctgcaacgtcaccaatgccctaggagctcgccaggcagaactgaccgtccaggtcaaagagggacctcccagtgagcactcaggcatgtcccgtaacgccatcatcttcctggttctgggaatcctggtttttctgatcctgctggggatcgggatttatttctattggtccaaatgttcccgtgaggtcctttggcactgtcatctgtgtccctcgagtacagagcatgccagcgcctcagctaatgggcatgtctcctattcagctgtgagcagagagaacagctcttcccaggatccacagacagagggcacaaggtgacagcgtcgggactgagaggggagagagactggagctggcaaggacgtgggcctccagagttggacccgaccccaatggatgaagaccccctccaaagagaccagcctccctccctgtgccagacctcaaaacgacgggggcaggtgcaagttcataggtctccaagaccaccctcctttcatttgctagaaggactcactagactcaggaaagctgttaggctcacagttacagtttattacagtaaaaggacagagattaagatcagcaaagggaggaggtgcacagcacacgttccacgacagatgaggcgacggcttccatctgccctctcccagtggagccatataggcagcacctgattctcacagcaacatgtgacaacatgcaagaagtactgccaatactgccaaccagagcagctcactcgagatctttgtgtccagagttttttgtttgtcttgagacagggtctggctctgttggcagactagagtacagtggtgagatcacagttcattgcagccttgacttctcaacgccaagtcatcctcccacctcagcctcctgagtagctatgactacaggtatgtgccaccacgtctggctaatctttttattatttgtaaagtcgaggtttccctgtgttgcccaggctggtcttgaactcttggctccaagtgatacttctgccttggcctcccaaagtgctgaattaagcagctcaccatccacacggctgacctcatacatcaagccaataccgtgtggcccaagacccccaccataaatcacatcattagcatgaaccacccagagtggcccaagactcccagatcagctaccaggcaggatattccaagggcttagagatgaatgcccaggagctgaggataaagggcccgatctttctttgggcaaggttaagcctttactgcatagcagaccacacagaagggtgtgggccaccagagaattttggtaaaaatttggcctctggccttgagcttctaaatctctgtatccgtcagatctctgtggttacaagaaacagccactgaccctggtcaccagaggctgcaattcaggccgcaagcagctgcctagggggtgtccaaggagcagagaaaactactagatgtgaacttgaagaaggttgtcagctgcagccactttctgccagcatctgcagccactttctgccagcatctgcagccagcaagctgggactggcaggaaataacccacaaaagaagcaaatgcaatttccaacacaagggggaagggatgcagggggaggcagcgctgcagttgctcaggacacgctcctataggaccaagatggatgcgacccaagacccaggaggcccagctgctcagtgcaactgacaagttaaaaaggtctatgatcttgagggcagacagcagaattcctcttataaagaaaactgtttgggaaaatacgttgagggagagaagaccttgggccaagatgctaaatgggaatgcaaagcttgagctgctctgcaagagaaaataagcaggacagaggatttgctctggacagagatggaagagccgggaacagagaagtgtggggaagagataggaaccagcaggatggcaggggcaaagggctcaagggtgaggaggccagtgggaccccacagagttggggagataaaggaacattggttgctttggtggcacgtaagctccttgtctgtctccagcacccagaatctcattaaagcttatttattgtacctccaaaaaaaaaaaaaaaaaaa

SEQ ID NO: 76 - DNA, 3357 bp, Homo sapiens
gggttcgcgaccgcagccgagagaccccgggcgaccggcacctccgagactcgcgggccacctgcctcgaccttccccggagcgcccccgcctccgagtcgctacttgccgggccgggccgggccgggcgtgatgcgccgcgggacccctgtcctggccactggccgccgccgccgccgccgctgagaccccgagacccccagtgacgccgcagccatggagagcggcccgcgtgcggagctgggggcgggcgcacccccagctgtggtcgccaggacccccccagagccaagaccttctccagaaggtgacccttcccccccaccaccaccaatgtcagccctggtccccgacactcccccggacacccctcctgccatgaagaatgccactagctctaagcagctcccactggaaccagagagcccctcagggcaggtcgggcctaggccagcccccccgcaggaagagtccccttcctctgaagcaaagagcagaggacccaccccaccagccatgggcccacgggatgccagacctcctcgaaggagcagccagccatctccaacagcagtgccagcctccgacagccctcccaccaagcaagaggtgaagaaggcaggagagagacacaagctggcaaaggagcggcgagaagagcgggccaagtacctggcggccaagaaggcagtgtggctggagaaggaggagaaggccaaggcgctgcgggagaagcagctccaggagcgccggcgccggctggaggagcaacgtcttaaagccgagcaacgccgtgcagccctggaggaacggcagcggcagaagctcgagaaaaacaaggagcgctatgaagcagccatccaacggtcagtgaagaagacgtgggccgaaatccggcagcagcgctggtcctgggcaggggccctgcaccacagctctccaggacataagaccagtgggagcaggtgctccgtgtcggcagttaacctgcccaaacacgtggactctataatcaacaagcggctctcaaagtcctctgccacgctctggaactcccccagtagaaatcgcagcctgcagctgagcgcatgggagagcagcatcgtggatcgtctgatgacgcccactctctccttccttgctcggagtcgcagcgcggtcacactgccccgcaacggccgggaccagggtaggggctgcgaccctgggagaggccccacgtggggccgggcaggggccagcctggcgcgcgggccgcaacccgaccgcactcatccctctgcagccgtgccggtgtgcccgcgctcggcctccgccagccccctgacgccgtgcagcgtcacccgaagcgtgcaccgctgcgcccccgccggtgagcgcggggagcgccgcaagcccaacgccgggggcagccccgctccggtgcgccgccggccggaggcctcgccggtgcagaaaaaggagaagaaggacaaggagcgggaaaacgagaaggagaagagtgccctagcccgggagcgcagcctcaagaagcgccagtcgctgcccgcctccccacgtgcccgcctctccgccagcaccgcctctgagctcagccccaaatccaaggccaggccatcctctccctccacatcctggcacaggcctgcctccccctgccccagcccagggccaggccacactctgcctccaaagccaccgtccccccgaggcaccactgcatcccccaaggggcgggttcggaggaaggaggaggcaaaggagagccccagcgccgcagggcccgaggacaagagccagagcaagcgcagggccagtaacgagaaggagtcagcagccccagcctcaccggcaccttcgccggcgccctcgcccaccccagccccgccccagaaggagcagccccccgcggagacccctacagacgctgctgtcttgacctcacccccagcccctgctcccccggtgacccctagcaaaccaatggccggcaccacagaccgagaagaagccactcggctcttggctgagaagcggcgccaggcccgggagcagcgggagcgcgaggagcaggagcggaggctgcaggcagaaagggacaagcgaatgcgagaggagcagctggcacgggaggccgaggcccgggcggagcgggaggcggaggcccggaggcgggaggagcaggaggcacgagagaaggcgcaggccgagcaggaggagcaggagcggctgcagaagcagaaagaggaggccgaagctcggtcgcgggaagaggcggagcggcagcgtctggagcgggaaaagcacttccagcagcaggagcaagagcggcaagagcgcagaaagcgtctggaggagatcatgaagaggactcggaagtcagaagtttctgaaaccaagcagaagcaggacagcaaggaggccaacgccaacggttccagcccagagcctgtgaaagctgtggaggctcggtccccagggctgcagaaggaggctgtgcagaaagaggagcccatcccacaggagcctcagtggagtctcccaagcaaggagttgccagcgtccctggtgaatggcctgcagcctctcccagcacaccaggagaatggcttctccaccaacggaccctctggggacaagagtctgagccgaacaccagagacactcctgccctttgcagaggcagaagccttcctcaagaaagctgtggtgcagtccccgcaggtcacagaagtcctttaagagggtttgccttggatccgggcacagttgtgagggctcctctgcatcacctaccaggatgtctggaggagaaaaagacagaacaaagatggaagtggcctgggcccctgggggtgggtcctctctgttgtttttaatctgcaccttatagactgatgtctctttggccggagccagatctgcccctcagtgcattcgtgtgctcgcacgcgcagacatcccttctcccccatacacacatatacactcacagcctctctggcctcttcccttggggaggggccacctgtagtatttgccttgatttggtggggtacagtggatgtgaatactgtaaatagcttgtgctcagactcctctgcgtggagagggtgggtgcaggaggcagaccctccccccaaagccccctggggagatcttcctctctctatttaactgtaactgagggggatcccaggtctggggatgggggacaccttgggccacaggatactggttgcttcaggggtacccatgccccctgccctcgcctggaatcagtgttactgcatctgattaaatgtctccagaaataaagaataaaaaaaaaaaaaaaaaaaaaaaaaaaaaaaaaaa

SEQ ID NO: 77 - DNA, 683 bp, Homo sapiens
ctgcgcagatgaggggagactcgtcaccaggcgtgcagtgggcactgctgggctcccccatcccgtcctaacccggaacagccccgggcaggaggcgtggaaagtcgagggggtaaaccgcgaatgtgcgttgtgtaagccacggcgcagggtggggcgcgggcgggacttgggcgggcggggtgggcttggccgagctggcctccggggcaccgaccgctataaggccagtcggactgcgacacagcccatcccctcgaccgctcgcgtcgcatttggccgcctccctaccgctccaagcccagccctcagccatggcatgccccctggatcaggccattggcctcctcgtggccatcttccacaagtactccggcagggagggtgacaagcacaccctgagcaagaaggagctgaaggagctgatccagaaggagctcaccattggctcgaagctgcaggatgctgaaattgcaaggctgatggaagacttggaccggaacaaggaccaggaggtgaacttccaggagtatgtcaccttcctgggggccttggctttgatctacaatgaagccctcaagggctgaaaataaatagggaagatggagacaccctctgggggtcctctctgagtcaaatccagtggtgggtaattgtacaataaattttttttggtcaaattt

SEQ ID NO: 78 - DNA, 3217 bp, Homo sapiens
ggccgggagacctggcggagctgggggtggggggccagtttttgcaacggctaaggaagggcctgtgggtttattataaggcggagctcggcgggagaggtgcgggccgaatccgagccgagcggagaggaatccggcagtagagagcggactccagccggcggaccctgcagccctcgcctgggacagcggcgcgctgggcaggcgcccaagagagcatcgagcagcggaacccgcgaagccggcccgcagccgcgacccgcgcagcctgccgctctcccgccgccggtccgggcagcatgaggcgcgcggcgctctggctctggctgtgcgcgctggcgctgagcctgcagccggccctgccgcaaattgtggctactaatttgccccctgaagatcaagatggctctggggatgactctgacaacttctccggctcaggtgcaggtgctttgcaagatatcaccttgtcacagcagaccccctccacttggaaggacacgcagctcctgacggctattcccacgtctccagaacccaccggcctggaggctacagctgcctccacctccaccctgccggctggagaggggcccaaggagggagaggctgtagtcctgccagaagtggagcctggcctcaccgcccgggagcaggaggccaccccccgacccagggagaccacacagctcccgaccactcatcaggcctcaacgaccacagccaccacggcccaggagcccgccacctcccacccccacagggacatgcagcctggccaccatgagacctcaacccctgcaggacccagccaagctgaccttcacactccccacacagaggatggaggtccttctgccaccgagagggctgctgaggatggagcctccagtcagctcccagcagcagagggctctggggagcaggacttcacctttgaaacctcgggggagaatacggctgtagtggccgtggagcctgaccgccggaaccagtccccagtggatcagggggccacgggggcctcacagggcctcctggacaggaaagaggtgctgggaggggtcattgccggaggcctcgtggggctcatctttgctgtgtgcctggtgggtttcatgctgtaccgcatgaagaagaaggacgaaggcagctactccttggaggagccgaaacaagccaacggcggggcctaccagaagcccaccaaacaggaggaattctatgcctgacgcgggagccatgcgccccctccgccctgccactcactaggcccccacttgcctcttccttgaagaactgcaggccctggcctcccctgccaccaggccacctccccagcattccagcccctctggtcgctcctgcccacggagtcgtggggtgtgctgggagctccactctgcttctctgacttctgcctggagacttagggcaccaggggtttctcgcataggacctttccaccacagccagcacctggcatcgcaccattctgactcggtttctccaaactgaagcagcctctccccaggtccagctctggaggggagggggatccgactgctttggacctaaatggcctcatgtggctggaagatcctgcgggtggggcttggggctcacacacctgtagcacttactggtaggaccaagcatcttgggggggtggccgctgagtggcaggggacaggagtccactttgtttcgtggggaggtctaatctagatatcgacttgtttttgcacatgtttcctctagttctttgttcatagcccagtagaccttgttacttctgaggtaagttaagtaagttgattcggtatccccccatcttgcttccctaatctatggtcgggagacagcatcagggttaagaagactttttttttttttttttaaactaggagaaccaaatctggaagccaaaatgtaggcttagtttgtgtgttgtctcttgagtttgtcgctcatgtgtgcaacagggtatggactatctgtctggtggccccgtttctggtggtctgttggcaggctggccagtccaggctgccgtggggccgccgcctctttcaagcagtcgtgcctgtgtccatgcgctcagggccatgctgaggcctgggccgctgccacgttggagaagcccgtgtgagaagtgaatgctgggactcagccttcagacagagaggactgtagggagggcggcaggggcctggagatcctcctgcagaccacgcccgtcctgcctgtggcgccgtctccaggggctgcttcctcctggaaattgacgaggggtgtcttgggcagagctggctctgagcgcctccatccaaggccaggttctccgttagctcctgtggccccaccctgggccctgggctggaatcaggaatattttccaaagagtgatagtcttttgcttttggcaaaactctacttaatccaatgggtttttccctgtacagtagattttccaaatgtaataaactttaatataaagtagtcctgtgaatgccactgccttcgcttcttgcctctgtgctgtgtgtgacgtgaccggacttttctgcaaacaccaacatgttgggaaacttggctcgaatctctgtgccttcgtctttcccatggggagggattctggttccagggtccctctgtgtatttgcttttttgttttggctgaaattctcctggaggtcggtaggttcagccaaggttttataaggctgatgtcaatttctgtgttgccaagctccaagccccatcttctaaatggcaaaggaaggtggatggccccagcacagcttgacctgaggctgtggtcacagcggaggtgtggagccgaggcctaccccgcagacaccttggacatcctcctcccacccggctgcagaggccagaggcccccagcccagggctcctgcacttacttgcttatttgacaacgtttcagcgactccgttggccactccgagaggtgggccagtctgtggatcagagatgcaccaccaagccaagggaacctgtgtccggtattcgatactgcgactttctgcctggagtgtatgactgcacatgactcgggggtggggaaaggggtcggctgaccatgctcatctgctggtccgtgggacggtgcccaagccagaggctgggttcatttgtgtaacgacaataaacggtacttgtcatttcgggcaaaaaaaaaaaaaaaaaa

SEQ ID NO: 79 - DNA, 2640 bp, Homo sapiens
actcgccgcagcctgcgcgccttctccagtccgcggtgccatggcccccgcccgtctgttcgcgctgctgctgttcttcgtaggcggagtcgccgagtcgatccgagagactgaggtcatcgacccccaggacctcctagaaggccgatacttctccggagccctaccagacgatgaggatgtagtggggcccgggcaggaatctgatgactttgagctgtctggctctggagatctggatgacttggaagactccatgatcggccctgaagttgtccatcccttggtgcctctagataaccatatccctgagagggcagggtctgggagccaagtccccaccgaacccaagaaactagaggagaatgaggttatccccaagagaatctcacccgttgaagagagtgaggatgtgtccaacaaggtgtcaatgtccagcactgtgcagggcagcaacatctttgagagaacggaggtcctggcagctctgattgtgggtggcatcgtgggcatcctctttgccgtcttcctgatcctactgctcatgtaccgtatgaagaagaaggatgaaggcagctatgacctgggcaagaaacccatctacaagaaagcccccaccaatgagttctacgcgtgaagcttgcttgtgggcactggcttggactttagcggggagggaagccaggggattttgaagggtggacattagggtagggtgaggtcaacctaatactgacttgtcagtatctccagctctgattacctttgaagtgttcagaagagacattgtcttctactgttctgccaggttcttcttgagctttgggcctcagttgccctggcagaaaaatggattcaacttggcctttctgaaggcaagactgggattggatcacttcttaaacttccagttaagaatctaggtccgccctcaagcccatactgaccatgcctcatccagagctcctctgaagccagggggctaacggatgttgtgtggagtcctggctggaggtcctcccccagtggccttcctcccttcctttcacagccggtctctctgccaggaaatgggggaaggaactagaaccacctgcaccttgagatgtttctgtaaatgggtacttgtgatcacactacgggaatctctgtggtatatacctggggccattctaggctctttcaagtgacttttggaaatcaaccttttttatttgggggggaggatggggaaaagagctgagagtttatgctgaaatggatttatagaatatttgtaaatctatttttagtgtttgttcgtttttttaactgttcattcctttgtgcagagtgtatatctctgcctgggcaagagtgtggaggtgccgaggtgtcttcattctctcgcacatttccacagcacctgctaagtttgtatttaatggtttttgtttttgtttttgtttgtttcttgaaaatgagagaagagccggagagatgatttttattaattttttttttttttttttttttttactatttatagctttagatagggcctcccttcccctcttctttctttgttctctttcattaaaccccttccccagttttttttttatactttaaaccccgctcctcatggccttggccctttctgaagctgcttcctcttataaaatagcttttgccgaaacatagtttttttttagcagatcccaaaatataatgaaggggatggtgggatatttgtgtctgtgttcttataatatattattattcttccttggttctagaaaaatagataaatatatttttttcaggaaatagtgtggtgtttccagtttgatgttgctgggtggttgagtgagtgaattttcatgtggctgggtgggtttttgcctttttctcttgccctgttcctggtgccttctgatggggctggaatagttgaggtggatggttctaccctttctgccttctgtttgggacccagctggtgttctttggtttgctttcttcaggctctagggctgtgctatccaatacagtaaccacatgcggctgtttaaagttaagccaattaaaatcacataagattaaaaattccttcctcagttgcactaaccacgtttctagaggcgtcactgtatgtagttcatggctactgtactgacagcgagagcatgtccatctgttggacagcactattctagagaactaaactggcttaacgagtcacagcctcagctgtgctgggacgacccttgtctccctgggtaggggggggggaatgggggagggctgatgaggccccagctggggcctgttgtctgggaccctccctctcctgagaggggaggcctggtggcttagcctgggcaggtcgtgtctcctcctgaccccagtggctgcggtgaggggaaccaccctcccttgctgcaccagtggccattagctcccgtcaccactgcaacccagggtcccagctggctgggtcctcttctgcccccagtgcccttccccttgggctgtgttggagtgagcacctcctctgtaggcacctctcacactgttgtctgttactgattttttttgataaaaagataataaaacctggtactttctaaaaaaaaaaaaaaaaaaaaaaaaaaaaaa

SEQ ID NO: 80 - DNA, 655 bp, Homo sapiens
ttttttttgagacggattctggctctgtctcccaggctggagtgcagtggcgcgatctcagctcactgcaacccgcgcctcccgggttcaagcaattctcccgcctcagaaaaagattagaaggacagctgggatctgtatgtatagatctctctttttcttttttttaattaaaattttttttgatgtgttctcatctttttttttaaacagtgcacatgcatacatctgtgtaataaaaaataaaggacagtaattctggatacactcaggagacagataagtcaaccaggcacgaaggatgaaaacactacaaaaatcacagcatctaccagccagtgatcatgacagttaacattctggggtgtccctcctggcatacgcaccaaaactcacttggtttttgtaaaaactgacaccaggtgtatccatatgtgaagcaagaacactacaaacaggacagttgccaatgttatataaaatatatgaatgtttggccagacgcggtggctcatggctgtaatcccggcactctgggagcccaagatgggtggatcatctgaggtcagaagttcgagaccagcctggccaacatggtgaaaccctgcctccactataaatacaaaaattagctgggcatggtggcgggcacctg

SEQ ID NO: 81 - DNA, 1310 bp, Homo sapiens
gctcggagcccggagcgtgcctcggcggcctgtcggttttcaccatggagcagctgagctcagcaaacacccgcttcgccttggacctgttcctggcgttgagtgagaacaatccggctggaaacatcttcatctctcccttcagcatttcatctgctatggccatggtttttctggggaccagaggtaacacggcagcacagctgtccaagactttccatttcaacacggttgaagaggttcattcaagattccagagtctgaatgctgatatcaacaaacgtggagcgtcttatattctgaaacttgctaatagattatatggagagaaaacttacaatttccttcctgagttcttggtttcgactcagaaaacatatggtgctgacctggccagtgtggattttcagcatgcctctgaagatgcaaggaagaccataaaccagtgggtcaaaggacagacagaaggaaaaattccggaactgttggcttcgggcatggttgataacatgaccaaacttgtgctagtaaatgccatctatttcaagggaaactggaaggataaattcatgaaagaagccacgacgaatgcaccattcagattgaataagaaagacagaaaaactgtgaaaatgatgtatcagaagaaaaaatttgcatatggctacatcgaggaccttaagtgccgtgtgctggaactgccttaccaaggcgaggagctcagcatggtcatcctgctgccggatgacattgaggacgagtccacgggcctgaagaagattgaggaacagttgactttggaaaagttgcatgagtggactaaacctgagaatctcgatttcattgaagttaatgtcagcttgcccaggttcaaactggaagagagttacactctcaactccgacctcgcccgcctaggtgtgcaggatctctttaacagtagcaaggctgatctgtctggcatgtcaggagccagagatatttttatatcaaaaattgtccacaagtcatttgtggaagtgaatgaagagggaacagaggcggcagctgccacagcaggcatcgcaactttctgcatgttgatgcccgaagaaaatttcactgccgaccatccattccttttctttattcggcataattcctcaggtagcatcctattcttggggagattttcttccccttagaagaaagagactgtagcaatacaaaaatcaagcttagtgctttattacctgagtttttaatagagccaatatgtcttatatctttaccaataaaaccactgtccagaaaaaaaaaaaaaaaaaaaa

SEQ ID NO: 82 - DNA, 1900 bp, Homo sapiens
acaactctcagaggagcattgcccgtcagacagcaactcagagaataaccagagaacaaccagattgaaacaatggaggatctttgtgtggcaaacacactctttgccctcaatttattcaagcatctggcaaaagcaagccccacccagaacctcttcctctccccatggagcatctcgtccaccatggccatggtctacatgggctccaggggcagcaccgaagaccagatggccaaggtgcttcagtttaatgaagtgggagccaatgcagttacccccatgactccagagaactttaccagctgtgggttcatgcagcagatccagaagggtagttatcctgatgcgattttgcaggcacaagctgcagataaaatccattcatccttccgctctctcagctctgcaatcaatgcatccacagggaattatttactggaaagtgtcaataagctgtttggtgagaagtctgcgagcttccgggaagaatatattcgactctgtcagaaatattactcctcagaaccccaggcagtagacttcctagaatgtgcagaagaagctagaaaaaagattaattcctgggtcaagactcaaaccaaaggcaaaatcccaaacttgttacctgaaggttctgtagatggggataccaggatggtcctggtgaatgctgtctacttcaaaggaaagtggaaaactccatttgagaagaaactaaatgggctttatcctttccgtgtaaactcggctcagcgcacacctgtacagatgatgtacttgcgtgaaaagctaaacattggatacatagaagacctaaaggctcagattctagaactcccatatgctggagatgttagcatgttcttgttgcttccagatgaaattgccgatgtgtccactggcttggagctgctggaaagtgaaataacctatgacaaactcaacaagtggaccagcaaagacaaaatggctgaagatgaagttgaggtatacataccccagttcaaattagaagagcattatgaactcagatccattctgagaagcatgggcatggaggacgccttcaacaagggacgggccaatttctcagggatgtcggagaggaatgacctgtttctttctgaagtgttccaccaagccatggtggatgtgaatgaggagggcactgaagcagccgctggcacaggaggtgttatgacagggagaactggacatggaggcccacagtttgtggcagatcatccttttctttttcttattatgcataagataaccaactgcattttatttttcggcagattttcctcaccctaaaactaagcgtgctgcttctgcaaaagatttttgtagatgagctgtgtgcctcagaattgctatttcaaattgccaaaaatttagagatgttttctacatatttctgctcttctgaacaacttctgctacccactaaataaaaacacagaaataattagacaattgtctattataacatgacaaccctattaatcatttggtcttctaaaatgggatcatgcccatttagattttccttactatcagtttatttttataacattaacttttactttgttatttattattttatataatggtgagtttttaaattattgctcactgcctatttaatgtagctaataaagttatagaagcagatgatctgttaatttcctatctaataaatgcctttaattgttctcataatgaagaataagtaggtaccctccatgcccttctgtaataaatatctggaaaaaacattaaacaataggcaaatatatgttatgtgcatttctagaaatacataacacatatatatgtctgtatcttatattcaattgcaagtatataataaataaacctgcttccaaacaac

SEQ ID NO: 83 - DNA, 2557 bp, Homo sapiens
ttgtgctcctcgcttgcctgttccttttccacgcattttccaggataactgtgactccaggcccgcaatggatgccctgcaactagcaaattcggcttttgccgttgatctgttcaaacaactatgtgaaaaggagccactgggcaatgtcctcttctctccaatctgtctctccacctctctgtcacttgctcaagtgggtgctaaaggtgacactgcaaatgaaattggacaggttcttcattttgaaaatgtcaaagatataccctttggatttcaaacagtaacatcggatgtaaacaaacttagttccttttactcactgaaactaatcaagcggctctacgtagacaaatctctgaatctttctacagagttcatcagctctacgaagagaccctatgcaaaggaattggaaactgttgacttcaaagataaattggaagaaacgaaaggtcagatcaacaactcaattaaggatctcacagatggccactttgagaacattttagctgacaacagtgtgaacgaccagaccaaaatccttgtggttaatgctgcctactttgttggcaagtggatgaagaaatttcctgaatcagaaacaaaagaatgtcctttcagactcaacaagacagacaccaaaccagtgcagatgatgaacatggaggccacgttctgtatgggaaacattgacagtatcaattgtaagatcatagagcttccttttcaaaataagcatctcagcatgttcatcctactacccaaggatgtggaggatgagtccacaggcttggagaagattgaaaaacaactcaactcagagtcactgtcacagtggactaatcccagcaccatggccaatgccaaggtcaaactctccattccaaaatttaaggtggaaaagatgattgatcccaaggcttgtctggaaaatctagggctgaaacatatcttcagtgaagacacatctgatttctctggaatgtcagagaccaagggagtggccctatcaaatgttatccacaaagtgtgcttagaaataactgaagatggtggggattccatagaggtgccaggagcacggatcctgcagcacaaggatgaattgaatgctgaccatccctttatttacatcatcaggcacaacaaaactcgaaacatcattttctttggcaaattctgttctccttaagtggcatagcccatgttaagtcctccctgacttttctgtggatgccgatttctgtaaactctgcatccagagattcattttctagatacaataaattgctaatgttgctggatcaggaagccgccagtacttgtcatatgtagccttcacacagatagacctttttttttttccaattctatcttttgtttccttttttcccataagacaatgacatacgcttttaatgaaaaggaatcacgttagaggaaaaatatttattcattatttgtcaaattgtccggggtagttggcagaaatacagtcttccacaaagaaaattcctataaggaagatttggaagctcttcttcccagcactatgctttccttctttgggatagagaatgttccagacattctcgcttccctgaaagactgaagaaagtgtagtgcatgggacccacgaaactgccctggctccagtgaaacttgggcacatgctcaggctactataggtccagaagtccttatgttaagccctggcaggcaggtgtttattaaaattctgaattttggggattttcaaaagataatattttacatacactgtatgttatagaacttcatggatcagatctggggcagcaacctataaatcaacaccttaatatgctgcaacaaaatgtagaatattcagacaaaatggatacataaagactaagtagcccataaggggtcaaaatttgctgccaaatgcgtatgccaccaacttacaaaaacacttcgttcgcagagcttttcagattgtggaatgttggataaggaattatagacctctagtagctgaaatgcaagaccccaagaggaagttcagatcttaatataaattcactttcatttttgatagctgtcccatctggtcatgtggttggcactagactggtggcaggggcttctagctgactcgcacagggattctcacaatagccgatatcagaatttgtgttgaaggaacttgtctcttcatctaatatgatagcgggaaaaggagaggaaactactgcctttagaaaatataagtaaagtgattaaagtgctcacgttaccttgacacatagtttttcagtctatgggtttagttactttagatggcaagcatgtaacttatattaatagtaatttgtaaagttgggtggataagctatccctgttgccggttcatggattacttctctataaaaaatatatatttaccaaaaaattttgtgacattccttctcccatctcttccttgacatgcattgtaaataggttcttcttgttctgagattcaatattgaatttctcctatgctattgacaataaaatattattgaactac

SEQ ID NO: 84 - DNA, 3503 bp, Homo sapiens
gctggtgtcagagcccggcgagcgctggcagttccgcggcggggatgctgaggagcgctgggtccgggagcagccctggcccctgcggacttccgaggccgtgaaaacccctgcgctgcggcccttcccaggcccccgaggccgttcgccgttcccgaagcccgactgggggaagagtccagcaccaaagcggccgttctcggattccggagcgttctggagccccgagagacgccccggggttctagaagctccccggcggcgcccagtcccggcttcattcgggcgtccctccgaaacccactcgggtgcacgggtcgtcggcgagccgcgaccgggtcctggcgcgcaccatgatcgtggcggactccgagtgccgcgcagagctcaaggactacctgcggttcgccccgggcggcgtcggcgactcgggccccggagaggagcagagggagagccgggctcggcgaggccctcgagggcccagcgccttcatccccgtggaggaggtccttcgggagggggctgagagcctcgagcagcacctggggctggaggcactgatgtcctctgggcgagtagacaacctggcagtggtgatgggcctgcaccctgactactttaccagcttctggcgcctgcactacctgctgctgcacacggatggtcccttggccagctcctggcgccactacattgccatcatggctgccgcccgccatcagtgttcttacctggtaggctcccacatggccgagtttctgcagactggtggtgaccctgagtggctgctgggcctccaccgggcccccgagaagctgcgcaaactcagcgagatcaacaagttgctggcgcatcggccatggctcatcaccaaggaacacatccaggccttgctgaagaccggcgagcacacttggtccctggccgagctcattcaggctctggtcctgctcacccactgccactcgctctcctccttcgtgtttggctgtggcatcctccctgagggggatgcagatggcagccctgccccccaggcacctacaccccctagtgaacagagcagccccccaagcagggacccgttgaacaactctgggggctttgagtctgcccgcgacgtggaggcgctgatggagcgcatgcagcagctgcaggagagcctgctgcgggatgaggggacgtcccaggaggagatggagagccgctttgagctggagaagtcagagagcctgctggtgaccccctcagctgacatcctggagccctctccacacccagacatgctgtgctttgtggaagaccctactttcggatatgaggacttcactcggagaggggctcaggcaccccctaccttccgggcccaggattatacctgggaagaccatggctactcgctgatccagcggctttaccctgagggtgggcagctgctggatgagaagttccaggcagcctatagcctcacctacaataccatcgccatgcacagtggtgtggacacctccgtgctccgcagggccatctggaactatatccactgcgtctttggcatcagatatgatgactatgattatggggaggtgaaccagctcctggagcggaacctcaaggtctatatcaagacagtggcctgctacccagagaagaccacccgaagaatgtacaacctcttctggaggcacttccgccactcagagaaggtccacgtgaacttgctgctcctggaggcgcgcatgcaagccgctctgctgtacgccctccgtgccatcacccgctacatgacctgactcctgagcaggacctgggcccggttcagctccccacaaggacttctctgtctggagacagccccagacccttttgtgtcccatgcccaccctccccacgctgcagtgggcttgtgtgtgatgtgcagtcccgaagccacaccctcccttttcctcactggaatggacagttcattgcactgactctgggatctcagccctgctcctgggagctggaagagcacttggagatcctaagggaccacacccttcctccttcccctgcccacagaggcagagggcacaggaaagaagccgggccaagctcggaattaatgtgccacaagtgttgtggccttcctgaactgggaagtccctggctggcccccgggggagaggggcaaatgcctccgggactgacactccaggcagctttgccttctctcccctgtcatttccagatttcattacctcctacttgccattcacccatcaatgtgaaagtcagggtcacagctggtctgtgtgtccagttccctaaaagcctgttctgttgggcagcctgaggctgttgcccgaatcctagttcagttttttgacttcctttgccctttttcccttttctccatgcttaatggtgtgaggcgtcaggagagaggccaagtacataaaaaaaaaaaaagcagattatctctagagagtttgagcctttgctggtcacattgccttctgaagaggagggagtattagattataaatcctctttattttggtcctttatgcttgaggttccaacctggagccacagtgtgtgagaggaggaggagagggagaattctgttctcccagagctgcacctgcctcgcagaggccagcaccccactctcctgcctccagtggccctgccgcagatgtctcccaaaaagttgagcctttctagatggcttaggtggcaccatggctcagcaggaggggcgggaggcaccagggttcttgtttggaccctgcccctgggccatggccaggtgaccatggctacattgccaaacctctgactgccacagctgcagactgagagggtgggtctgagtccccacaatgtctgaagctgcccctgggattctcaggccaacctgccaacagcaagcggattttcttgcaagatcagggaccccatttctgcagccagtgtctcctgggtgccttctgaggactcccacccccatcccagtatctcatctgtcccctctcctggggcttaagtgggttgcttccaggcagaagcagccaaggaccgattccaggcactttctgtagcaaatgactgtgaattacgacttctcttgcccttcttctagcagtctgtgcctcctctctgaccagtttggagggcactgaagaaaggcaagggccgtgctgctgctgggcggggcaggagaggagcctggccagtgtgccacattaaatacccgtgcaggcgcggagaagcaaccggcacccccttccggcctgaaagccctccctgcaagaaggtgtgcaggagagaagaggccccggcatggggatctgggttctagagggcatgtgatgactgtaaatgttcactgggtgggtagggagtggtatccagtgttcaagtgcagaaatctttggctttgctaccagttccatatgatgagaaataaacgttcgctgaggttttgtttcataaaaaaaaaaaaaaaaaaa

SEQ ID NO: 85 - DNA, 1336 bp, Homo sapiens
gagagacacagagtccggcattggtcccaggcagcagttagcccgccgcccgcctgtgtgtccccagagccatggagagagccagtctgatccagaaggccaagctggcagagcaggccgaacgctatgaggacatggcagccttcatgaaaggcgccgtggagaagggcgaggagctctcctgcgaagagcgaaacctgctctcagtagcctataagaacgtggtgggcggccagagggctgcctggagggtgctgtccagtattgagcagaaaagcaacgaggagggctcggaggagaaggggcccgaggtgcgtgagtaccgggagaaggtggagactgagctccagggcgtgtgcgacaccgtgctgggcctgctggacagccacctcatcaaggaggccggggacgccgagagccgggtcttctacctgaagatgaagggtgactactaccgctacctggccgaggtggccaccggtgacgacaagaagcgcatcattgactcagcccggtcagcctaccaggaggccatggacatcagcaagaaggagatgccgcccaccaaccccatccgcctgggcctggccctgaacttttccgtcttccactacgagatcgccaacagccccgaggaggccatctctctggccaagaccactttcgacgaggccatggctgatctgcacaccctcagcgaggactcctacaaagacagcaccctcatcatgcagctgctgcgagacaacctgacactgtggacggccgacaacgccggggaagaggggggcgaggctccccaggagccccagagctgagtgttgcccgccaccgccccgccctgccccctccagtcccccaccctgccgagaggactagtatggggtgggaggccccacccttctcccctaggcgctgttcttgctccaaagggctccgtggagagggactggcagagctgaggccacctggggctggggatcccactcttcttgcagctgttgagcgcacctaaccactggtcatgcccccacccctgctctccgcacccgcttcctcccgaccccaggaccaggctacttctcccctcctcttgcctccctcctgcccctgctgcctctgatcgtaggaattgaggagtgtcccgccttgtggctgagaactggacagtggcaggggctggagatgggtgtgtgtgtgtgtgtgtgtgtgtgtgtgtgtgtgcgcgcgcgccagtgcaagaccgagattgagggaaagcatgtctgctgggtgtgaccatgtttcctctcaataaagttcccctgtgacactcaaaaaaaaaaaaaaaaaaaaa

SEQ ID NO: 86 - DNA, 2035 bp, Homo sapiens
ttaaagtcgcccccggcgcggagcggaccggcagaggcgggcagaggcggcgagaggcggcgagaggcgggctgaggcggcccagcggcggcaggtgaggcggaaccaaccctcctggccatgggaggggccgtggtggacgagggccccacaggcgtcaaggcccctgacggcggctggggctgggccgtgctcttcggctgtttcgtcatcactggcttctcctacgccttccccaaggccgtcagtgtcttcttcaaggagctcatacaggagtttgggatcggctacagcgacacagcctggatctcctccatcctgctggccatgctctacgggacaggtccgctctgcagtgtgtgcgtgaaccgctttggctgccggcccgtcatgcttgtggggggtctctttgcgtcgctgggcatggtggctgcgtccttttgccggagcatcatccaggtctacctcaccactggggtcatcacggggttgggtttggcactcaacttccagccctcgctcatcatgctgaaccgctacttcagcaagcggcgccccatggccaacgggctggcggcagcaggtagccctgtcttcctgtgtgccctgagcccgctggggcagctgctgcaggaccgctacggctggcggggcggcttcctcatcctgggcggcctgctgctcaactgctgcgtgtgtgccgcactcatgaggcccctggtggtcacggcccagccgggctcggggccgccgcgaccctcccggcgcctgctagacctgagcgtcttccgggaccgcggctttgtgctttacgccgtggccgcctcggtcatggtgctggggctcttcgtcccgcccgtgttcgtggtgagctacgccaaggacctgggcgtgcccgacaccaaggccgccttcctgctcaccatcctgggcttcattgacatcttcgcgcggccggccgcgggcttcgtggcggggcttgggaaggtgcggccctactccgtctacctcttcagcttctccatgttcttcaacggcctcgcggacctggcgggctctacggcgggcgactacggcggcctcgtggtcttctgcatcttctttggcatctcctacggcatggtgggggccctgcagttcgaggtgctcatggccatcgtgggcacccacaagttctccagtgccattggcctggtgctgctgatggaggcggtggccgtgctcgtcgggcccccttcgggaggcaaactcctggatgcgacccacgtctacatgtacgtgttcatcctggcgggggccgaggtgctcacctcctccctgattttgctgctgggcaacttcttctgcattaggaagaagcccaaagagccacagcctgaggtggcggccgcggaggaggagaagctccacaagcctcctgcagactcgggggtggacttgcgggaggtggagcatttcctgaaggctgagcctgagaaaaacggggaggtggttcacaccccggaaacaagtgtctgagtggctgggcggggccggcaggcacagggaggaggtacagaagccggcaacgcttgctatttattttacaaactggactggctcaggcagggccacggctgggctccagctgccggcccagcggatcgtcgcccgatcagtgttttgagggggaaggtggcggggtgggaaccgtgtcattccagagtggatctgcggtgaagccaagccgcaaggttacaaggcatcctcaccaggggccccgcctgctgctcccaggtggcctgcggccactgctatgctcaaggacctggaaacccatgcttcgagacaacgtgactttaatgggagggtgggtgggccgcagacaggctggcagggcaggtgctgcgtggggccctctccagcccgtcctaccctgggctcacatggggcctgtgcccacccctcttgagtgtcttggggacagctctttccacccctggaagatggaaataaacctgcgtgtgggtggagtgttaggaccaacggtttccta

SEQ ID NO: 87 - DNA, 2195 bp, Homo sapiens
ggctgcaggcggggccggcgggggcgcagcggcccgggaggaagcagtaccttgaagagaaattggagagggagtcaattcctaggatagcagagagatggacaacagacagaatagatggagtttcacaatggtggccatgtgtctggaattggtgggttcttggtctcactgacttcaagaatgaagccgcacaccctcgcagtcaccccagctctgatctttgccatcacagttgctacaatcggctctttccagtttggctacaacactggggtcatcaatgctcctgagacgatcataaaggaatttatcaataaaactttgacggacaaggcaaatgcccctccctctgaggtgctgctcacgaatctctggtccttgtctgtggccatattttccgtcgggggtatgatcggctccttttccgtcggactctttgttaaccgctttggcaggcgcaattcaatgctgattgtcaacctgttggctgccactggtggctgccttatgggactgtgtaaaatagctgagtcagttgaaatgctgatcctgggccgcttggttattggcctcttctgcggactctgcacaggttttgtgcccatgtacattggagagatctcgcctactgccctgaggggtgcctttggcactctcaaccagctgggcatagttattggaattctggtggcccagatctttggtctggaactcatccttgggtctgaagagctatggccggtgctattaggctttaccatccttccagctatcctgcaaagtgcagcccttccatgttgccctgaaagtcccagatttttgctcattaacagaaaaaaagaggagaatgctacgcggatcctccagcggttgtggggcacccaggatgtatcccaagacatccaggagatgaaagatgagagtgcaaggatgtcacaagaaaagcaagtcaccgtgctggagctctttagagtgtccagctaccgacagcccatcatcatttccattgtgctccagctctctcagcagctctctgggatcaatgctgtgttctattactcaacaggaatcttcaaggatgcaggtgttcaacagcccatctatgccaccatcagcgcgggtgtggttaatactatcttcactttactttctctatttctggtggaaagggcaggaagaaggactctgcatatgataggccttggagggatggctttttgttccacgctcatgactgtttctttgttattaaagaatcactataatgggatgagctttgtctgtattggggctatcttggtctttgtggcctgttttgaaattggaccaggccccattccctggtttattgtggccgaactcttcagccagggcccccgcccagctgcgatggcagtggccggctgctccaactggacctccaacttcctagtcggattgctcttcccctctgctgcttactatttaggagcctacgtttttattatcttcaccggcttcctcattaccttcttggcctttaccttcttcaaagtccctgagacccgtggcaggacttttgaggatatcacacgggcctttgaagggcaggcacacggtgcagatagatctgggaaggacggcgtcatggggatgaacagcatcgagcctgctaaggagaccaccaccaatgtctaagtcatgcctccttccacctccctcccggcatgggaaagccacctctccctcaacaagggagagactttatcaggatgaacccaggactgcttctgaatgctgctacttgatttctttctcatcccacgcactccatgagcaccccaaggctgcagtttgttggatcttcaatggctttttaaattttatttcctggacatcctcttctgcttaggagagaccgagtgaacctaccttcatttcaggagggattggccgcttggcacatgacaactttgccagcttttcctcccttgggttctgatattgccgcactagaggatataggagaggaaaagtaaggtgcagttgccccaacctcagacttaccaggaagcagatacatatgagtgtggaagccggagggtgtttatgtaagagcaccttcctcacttccatacagctctacgcggcaaattaacttgagttttatttatcttatcctctggtttaattacataaatatttatttttta

SEQ ID NO: 88 - DNA, 3915 bp, Homo sapiens
gtggggtggggtggggctgggggcttgtcgccctttcaggctccaccctttgcggagattataaatagtcatgatcccagcgagacccagagatgcctgtaatggtgagactttggatccttcctgaggacgtggagaaaactttctgctgagaaggacattttgaaggttttgttggctgaaaaagctgtttctggaatcacccctagatctttcttgaagacttgaattagattacagcgatggggacacagaaggtcaccccagctctgatatttgccatcacagttgctacaatcggctctttccaatttggctacaacactggggtcatcaatgctcctgagaagatcataaaggaatttatcaataaaactttgacggacaagggaaatgccccaccctctgaggtgctgctcacgtctctctggtccttgtctgtggccatattttccgtcgggggtatgatcggctccttttccgtcggactcttcgtcaaccgctttggcaggcgcaattcaatgctgattgtcaacctgttggctgtcactggtggctgctttatgggactgtgtaaagtagctaagtcggttgaaatgctgatcctgggtcgcttggttattggcctcttctgcggactctgcacaggttttgtgcccatgtacattggagagatctcgcctactgccctgcggggtgcctttggcactctcaaccagctgggcatcgttgttggaattctggtggcccagatctttggtctggaattcatccttgggtctgaagagctatggccgctgctactgggttttaccatccttcctgctatcctacaaagtgcagcccttccattttgccctgaaagtcccagatttttgctcattaacagaaaagaagaggagaatgctaagcagatcctccagcggttgtggggcacccaggatgtatcccaagacatccaggagatgaaagatgagagtgcaaggatgtcacaagaaaagcaagtcaccgtgctagagctctttagagtgtccagctaccgacagcccatcatcatttccattgtgctccagctctctcagcagctctctgggatcaatgctgtgttctattactcaacaggaatcttcaaggatgcaggtgttcaagagcccatctatgccaccatcggcgcgggtgtggttaatactatcttcactgtagtttctctatttctggtggaaagggcaggaagaaggactctgcatatgataggccttggagggatggctttttgttccacgctcatgactgtttctttgttattaaaggataactataatgggatgagctttgtctgtattggggctatcttggtctttgtagccttctttgaaattggaccaggccccattccctggtttattgtggccgaactcttcagccagggcccccgcccagctgcgatggcagtggccggctgctccaactggacctccaacttcctagtcggattgctcttcccctccgctgctcactatttaggagcctacgtttttattatcttcaccggcttcctcattaccttcttggcttttaccttcttcaaagtccctgagacccgtggcaggacttttgaggatatcacacgggcctttgaagggcaggcacacggtgcagatagatctggaaaggacggcgtcatggagatgaacagcatcgagcctgctaaggagaccaccaccaatgtctaagtcgtgcctccttccacctccctcccggcatgggaaagccacctctccctcaacaagggagagacctcatcaggatgaacccaggacgcttctgaatgctgctacttaattcctttctcatcccacgcactccatgagcaccccaaggctgcggtttgttggatcttcaatggctttttaaattttatttcctggacatcctcttctgcttaggagagaccgagtgaacctaccttcatttcaggagggattggccgcttggcacatgacaactttgccagcttttcctcccttgggttctgatattgccgcactaggggatataggagaggaaaagtaaggtgcagttcccccaacctcagacttaccaggaagcagatacatatgagtgtggaagccggagggtgtttatgtaagagcaccttcctcacttccatacagctctacgtggcaaattaacttgagttttatttattttatcctctggtttaattacataatttttttttttttactttaagtttcaggatacatgtgccgaatgtgcaggtttgttacataggtatatatatgccatgatggaaatatttatttttttaagcgtaattttgccaaataataaaaacagaaggaaattgagattagagggaggtgtttaaagagaggttatagagtagaagatttgatgctggagaggttaaggtgcaataagaatttagggagaaatgttgttcattattggagggtaaatgatgtggtgcctgaggtctgtacgttacctcttaacaatttctgtccttcagatggaaactctttaacttctcgtaaaagtcatatacctatataataaagctactgatttccttggagcttttttctttaagataatagtttacatgtagtagtacttgaaatctaggattattaactaatatgggcattgtagttaatgatggttgatgggttctaattttggatggagtccagggaagagaaagtgatttctagaaagcctgttcccctcactggatgaaataactccttcttgtagtagtctcattacttttgaagtaatcccgccacctatctcgtgggagagccatccaaataagaaacctaaaataattggttcttggtagagattcattatttttccactttgttctttaggagattttaggtgttgattttctgttgtattttaactcatacctttaaaggaattccccaaagaatgtttatagcaaacttggaatttgtaacctcagctctgggagaggatttttttctgagcgattattatctaaagtgtgttgttgctttaggctcacggcacgcttgcgtatgtctgttaccatgtcactgtggtcctatgccgaatgccctcaggggacttgaatctttccaataaaccaggtttagacagtatgagtcaatgtgcagtgtagcccacacttgagaggatgaatgtatgtgcactgtcactttgctctgggtggaagtacgttattgttgacttattttctctgtgtttgttcctacagcccctttttcatatgttgctcagtctccctttcccttcttggtgcttacacatctcagaccctttagccaaacccttgtcagtgacagtattttggttcttagttctcactgttccctctgctcctggagcctttgaataaaaatgcacgtagctgaggccggatgcggtggctcacgcctgtaatcccagcactttgggaggcctaggcgggcggtcaggggttcgagaccagtctggccaacatcgtgaaaccctgtctctactaaaaatgcaaaaattagccgggcgtggtggcgggcgcctgtaatcccagctacttgggaagctgaggcgggagaatcatgtgaacccgggacgcaggggttgcagtgagcggagatcgcatcattgcactctagcctgggccacagggcgagactccgtctcaaaaaaaaaaaaatgcacatagctatcgagtgtgctttagcttgaaaaggtgaccttgcaacttcatgtcaactttctggctcctcaaacagtaggttggcagtaaggcagggtcccatttctcactgagaagattgtgaatatttccatatggattttctattgttactctggttctttgttttaaaataaaaattctgaatgtacacg

SEQ ID NO: 89 - DNA, 4516 bp, Homo sapiens
ctcggcgcgcctggacccctgcccctctctgggtggagaagctcccggccgcttcccggtttcactccttctcagcctgggctcccagcccctctctccttttcctggactggctctcacccccttcggtccccttcctttagctcaggctccctaccccttcctttagcccacagcccagagtcccagctcctcagtcactttcctcagccaaaggtcccagccttccttcttcctttcctttgcactatccctatcctgccccttcctctatccctagggctcagtttcccacatccgtcctcccccttcccaggcccggagttccagaccttttggtctcctttcgtggtcgttcctgggtccttgccccctttccccactttggagttccagattgcaaacccagcctccctccacccccagaaaattgcttccatggaaatgcctctctaaaacatgaacttttcctagagactacgccagtctctcttcccacttgctgaccctttgctacctatgtgcccggttttactctcatttgggtaaggtcgaggctggctctggaagcagcaccatggttctgcggtctggcatctgtggcctctctccacatcggatcttcccttccttactcgtggtggttgctttggtggggctgctgcctgttctcaggagccatggcctccagctcagcccaactgccagcaccattcgaagctcagagccaccacgagaacgctcgattggggatgtcaccaccgctccaccggaggtcaccccagagagccgccctgttaatcattccgtcactgatcatggcatgaagccgcgcaaggcctttccagtcctgggcatcgactacacacacgtgcgcacccccttcgagatctccctctggatccttctggcctgcctcatgaagataggtttccatgtgatccccactatctcaagcatcgtcccggagagctgcctgctgatcgtggtggggctgctggtggggggcctgatcaagggtgtaggcgagacaccccccttcctgcagtccgacgtcttcttcctcttcctgctgccgcccatcatcctggatgcgggctacttcctgccactgcggcagttcacagaaaacctgggcaccatcctgatctttgccgtggtgggcacgctgtggaacgccttcttcctgggcggcctcatgtacgccgtgtgcctggtgggcggtgagcagatcaacaacatcggcctcctggacaacctgctcttcggcagcatcatctcggccgtggaccccgtggcggttctggctgtctttgaggaaattcacatcaatgagctgctgcacatccttgtttttggggagtccttgctcaatgacgccgtcactgtggtcctgtatcacctctttgaggagtttgccaactacgaacacgtgggcatcgtggacatcttcctcggcttcctgagcttcttcgtggtggccctgggcggggtgcttgtgggcgtggtctacggggtcatcgcagccttcacctcccgatttacctcccacatccgggtcatcgagccgctcttcgtcttcctctacagctacatggcctacttgtcagccgagctcttccacctgtcaggcatcatggcgctcatagcctcaggagtggtgatgcgcccctatgtggaggccaacatctcccacaagtcccacaccaccatcaaatacttcctgaagatgtggagcagcgtcagcgagaccctcatcttcatcttcctcggcgtctccacggtggccggctcccaccactggaactggaccttcgtcatcagcaccctgctcttctgcctcatcgcccgcgtgctgggggtgctgggcctgacctggttcatcaacaagttccgtatcgtgaagctgacccccaaggaccagttcatcatcgcctatgggggcctgcgaggggccatcgccttctctctgggctacctcctggacaagaagcacttccccatgtgtgacctgttcctcactgccatcatcactgtcatcttcttcaccgtctttgtgcagggcatgaccattcggcccctggtagacctgttggctgtgaagaaaaagcaagagacgaagcgctccatcaacgaagagatccacacacagttcctggaccaccttctgacaggcatcgaagacatctgtggccactacggtcaccaccactggaaggacaagctcaaccggtttaataagaaatatgtgaagaagtgtctgatagctggcgagcgctccaaggagccccagctcattgccttctaccacaagatggagatgaagcaggccatcgagctggtggagagcgggggcatgggcaagatcccctctgccgtctccaccgtctccatgcagaacatccaccccaagtccctgccttccgagcgcatcctgccagcactgtccaaggacaaggaggaggagatccgcaaaatcctgaggaacaacttgcagaagaccaggcagcggctgcggtcctacaacagacacacgctggtggcagacccctacgaggaagcctggaaccagatgctgctccggaggcagaaggcccggcagctggagcagaagatcaacaactacctgacggtgccagcccacaagctggactcacccaccatgtctcgggcccgcatcggctcagacccactggcctatgagccgaaggaggacctgcctgtcatcaccatcgacccggcttccccgcagtcacccgagtctgtggacctggtgaatgaggagctgaagggcaaagtcttagggttgagccgggatcctgcaaaggtggctgaggaggacgaggacgacgatgggggcatcatgatgcggagcaaggagacttcgtccccaggaaccgacgatgtcttcacccccgcgcccagtgacagccccagctcccagaggatacagcgctgcctcagtgacccaggcccacaccctgagcctggggagggagaaccgttcttccccaaggggcagtaacgccagggccagcaggcagcgcctgtcccctcacagactcttccaccagagcaggggctgctgggggctccccttgcccttcctgacccggattggccctgcccctccccctaccgcatggcagctgggcccacagcccccaccccagcacagctcctcccctgccgcctcccgggaagcatcctccccaccagagctgcctccccaatccatttggcagaactgctggggctggtgaggccggccctgcccctccctagatccaggcttctcccggacctggactagggcctcggaggctcctccctctgcctcatcctcctcctcattcagaccaatcttagtttctaaccaaagagtctctggctcagctgtggtcccacccaggaagggagggagctgaggcctcccttgagtaggccctgctttatcaggggacaaaccaggggtaccaggcacatggctgggggagggactgctgacccaccaaggtctcacactcctcctgccagctctgtcaccctggccaccacccaacctatccttactcagagctgcgggctgagggcatctctgagtgtctctgcctggagcaggggtggtttctacggtgacagtgacgtgactcagagcttttcgaactgtgctcccacggggaccactgggcccctcaggggaagctgctaggggaaggactggccgtggctccagaatgtgctgcctttttaagttttgtttgttcacactcctatatatgattgtttgcacagagggcgctcctgtttttaaaacattttgaaaacccctggctgaacagtgctctgcctctaactccctcctcacactccagaattacccttcctcatctgtgcctgtctgtccaacccctcccccacgtctctctgcctgctgggctcttaactgttgctcgaagactgtgacatcagaagtaactcccactcctaatcaagagtctctccagcctcacagatgctggcctcttggcacctgcctagctcttgggcctgacctccagtcctgctggcctgctcttacttcccccaccctgggtttggcccctggaacctttcccttgtgtgtaccacaccctgcctgctgtggagcccattgtggaggcggtgggggggagaaggcctcccctgaggatcccctgtcccctggggctggtggattgggcagaatcctgggcccccagagacctttgcccacacacactccttccccttgtccctggggcactcccccaggattgtgcaatagtcagagtgtccctttttgcaggggactgggccatgggtcctcggcccatctgtccatcctcctctccatgcaagtgctgtttgggcaggagtcaccatgcaagggtgacatcgacaaccacgtaccaagccaccgcagctgctgccactctgctgcctgtacagaagaaactgaatctttttcatattctaataaatcaatgtgagtttt

SEQ ID NO: 90 - DNA, 4934 bp, Homo sapiens
gcgagctgagctgacagcgcggagctggcgctgtggagcgcagggagccttgccggttcctccgaccggcgtctgcgagtacagcggcggctaacctgccccggcttcaggatttacacagacgtggggcgatgcttgtgaccctgcagctcctcaaaccagcctgtattgagcggtttgcagcctgatgctcagccccctccccacagggcccctagaagcctgtttctccgtacagtccaggacctccagccccatggagcccccgatcccacagagcgcccccttgactcccaactcagtcatggtccagccccttcttgacagccggatgtcccacagccggctccagcacccactcaccatcctacccattgaccaggtgaagaccagccatgtggagaatgactacatagacaaccctagcctggccctgaccaccggcccaaagcggacccggggcggggccccagagctggccccgacgcccgcccgctgtgaccaggatgtcacccaccattggatctccttcagcgggcgccccagctctgtgagcagcagcagcagcacatcctctgaccaacggctcttagaccacatggcaccaccacccgtggctgaccaggcctcaccaagggctgtgcgcatccagcccaaggtggtccactgccagccgctggacctcaagggcccggcggtcccacccgagctggacaagcacttcttgctgtgcgaggcctgtgggaagtgtaaatgcaaggagtgtgcatccccccggacgttgccttcctgctgggtctgcaaccaggagtgcctgtgctcagcccagactctggtcaactatggcacgtgcatgtgtttggtgcagggcatcttctaccactgcacgaatgaggacgatgagggctcctgcgctgaccacccctgctcctgctcccgctccaactgctgcgcccgctggtccttcatgggtgctctctccgtggtgctgccctgcctgctctgctacctgcctgccaccggctgcgtgaagctggcccagcgtggctacgaccgtctgcgccgccctggttgccgctgcaagcacacgaacagcgtcatctgcaaagcagccagcggggatgccaagaccagcaggcccgacaagcctttctgacagtttgtgtcgaagccccagtgctctgcctggaaacctggttctcttctgacatctaagaagactgcagcaaggtcagaggttttagcctcctgaggctgaccttgctagtctgcccactccctacccccagcttcggaaaatacagagaccaccaccacgtaccctgtattccccaaggtgatgaagaagcactttggggctttttttcagggtcctgaaactttgtgtcaaacagacaatgcaggggcagggtgtggtttggggggaaatttttctttttcagaagacagaacacagatgtggacacatatccggaaactgcagctgcttgaatgccttcccagcccctccttctccctccctccctccgccccccccttcctcttttccattgtctttggctctcacaggagctagctgcctgggaggaattgttaactgagtaccagggtacctttaaagaagacccttggagtcttctataccttcttctccttccccatctcactccaccccactttgtccctgatgtcttggggaaggtgtagaacaccctagcagttcctattgtatatacttgggagccactgagaacagaggacggccagtgagtccaagcctcgttcctccttctgcctccccggagccacaggatggatttaggagccactgctcagtgcacttctcccttccaactgcatcaactaactctcgggggtgttctgctcaccacaccgtccttcggttcttactgagtcacagactcgcctgcccactacgtgtcctgggttctctactcagatcccttccagaaactttatatgggtagaggaagccagggcggcaaatgcgagaccaaatatcattttgccaatgagtctgaggctgtggtctctggatccagtcattatgtttttatagaataattaaaccggatgctaacggtgttttaaaaaataataataaaacaacttgtttccttttggccacccccaggaagggctgatttcaaaatctgggggcgagcaacctcaaggaacacaatttccctccctatcaacaagaggattttaacagcaaagaagagaggcagcacctcccattggcagaatgaccgctgagccaggctgggtttgggtttcttctcttctgattctgctgctcactgtcatagccttttgtgtatagtgatgtgtctgtatctttaatgtaaatagagagatgatgaaaaaagagtctattttagtgttaggaagccccagcaggggagtcggaagagcttggaagagctggggagagggtaggggaaaggtttttccaggggccactgggtttgagccctgcttctgtgcacagccacaccaccctctcccgacagccctcaaagacgtagcaactctttctctcaaggtgctaaaggactcagaaggtgcagcacgtccagtgggtaggtacttgttgcatgcaaaagctgtagtgtatctggtccttcctccccagcttttgtgtggggttcttgctttgtgtggtattttgttttcccctctaatgagagggcatggcctgagtcagaagagctaccccaggtgaaactggaagtgcatgaggcagagcgtccgtagcatttccagtttgttctgtataggacagaggtgcctccgggaaggaggcagcgaggtaggtagctatgataggcacctaatgcttctcaaggacttattttttccttcttgaagactagtagtaacatcttatgatttagagtaagttgattgtaaccataggtatttattgattggaggaagggagggtcatattattttcggctttatttatgtaacatttgctagcttataaaaggcgaatgtgaaatattgcatctgcattttccaaggctgattcgtgtagctacccttgccacagttgtgacggatgtatggatgttcttgaacatttcagaaggagtggtagaaaaaaacacacattcagccaaccacttatatgaattgaatgtatcagaagtgtactgaagggactggagatggttttcctcagatgagggggccccaaaattgatagtgcacatctgcacgctttctgcgaggcctcagaacttttcccagggcccctccctcaaattgtctccatgggaaacttgacccagtggcaagttgcactttggtgatcttggtggtctacacacccgttctgtggagagtcgatttacataagctgtgtatacacacacacacacacacacacacacacacacacacacacccctaccccacactgactgtctaccgacagagaccctatttcctggcaaacggcctcctgaaccctgactttttgtgtacatacttgtaaacacggatttttctgggttttggtttgctttttccttttttccccctgcccctgttctagcttgttcttcttggtttgctttcaacctgcttgatggatgtctgcagagtgctctctaagagtccacctcagtgcctcgtgtgctcagtggtcatgggaaggagcgaaggaaccatccttggttctcccagcttggttgtgtagcaatccctcagcattgtttttctcagcttcttggcaaaaattaaaacaacaacaacaacaacaacaacaacaacaaacagaaggataaactggcttgcctgtggaccctccccggctctggggccagtcgagagccactgagggacccagcactcagagacacaacacacatgtgtagctgcttctggctgagtgtgtttcctgtcaccaatggcctgtttggctggacgatgcctcggcttgaccttttttgaaaagtgctggttagttcccgccccctggtaaacctggggtaggtgggggttctgtcttaactcgaggggcacctgggatccaggacgcttctagggggctctggctgcccgtgttaatgaaggacagcgcttccgcgagcaccctgggaactgggtcttgggtagcaaagccctcccagagaaaagatgggcacaactaaggctttcctgagcaggaagggggtgaagaccaatcccttcctttggtcctttggtacgcaccccctcagagctgagatggaagacatggctagttcttttcagccttgtggagcctgtcagtcgccatcatacctcgagtgaggcccagctagataatgacttgtccaagatggcacacgtggaaagttgatctgcaccagaacccggatgactgtcaccttgaagcgtcctgttctccttctgtgctgtcccaggaagtgtctggcgggcgtgggcagcacagctctacactgtacgattcactagggcatcctgcgagcctcactagccttctggttcatgcctttgacaagcatttttgtgccccctctgcttactgtgacagtcgatgatgaatcttgcgttgccattttctgctgtgggtaactgcgtgcagtgtcttgccttgctttctcttcttactgtcccacagcttggtttcatgttacaaacagaaaagctcgaggctcccaccccgccacatcccaacttcatttccccctcactgtagcccatttccaccccaccacaaagttgccacaggttttctttgtatagaatatttattttgaagctctattttaatagtatttattttagaaagtctactattgtaagagttcttctgtttgtgaagaaaaaaacaagttaaaaactgaatgtactgatttagaaaatatatataaatatatattgttaaatataaa

SEQ ID NO: 91 - DNA, 1203 bp, Homo sapiens
agaaagccgcgcacctcctcccgccaggcgctttctcggacgccttgcccagcgggccgcccgaccccctgcaccatggaccccgctcgccccctggggctgtcgattctgctgcttttcctgacggaggctgcactgggcgatgctgctcaggagccaacaggaaataacgcggagatctgtctcctgcccctagactacggaccctgccgggccctacttctccgttactactacgacaggtacacgcagagctgccgccagttcctgtacgggggctgcgagggcaacgccaacaatttctacacctgggaggcttgcgacgatgcttgctggaggatagaaaaagttcccaaagtttgccggctgcaagtgagtgtggacgaccagtgtgaggggtccacagaaaagtatttctttaatctaagttccatgacatgtgaaaaattcttttccggtgggtgtcaccggaaccggattgagaacaggtttccagatgaagctacttgtatgggcttctgcgcaccaaagaaaattccatcattttgctacagtccaaaagatgagggactgtgctctgccaatgtgactcgctattattttaatccaagatacagaacctgtgatgctttcacctatactggctgtggagggaatgacaataactttgttagcagggaggattgcaaacgtgcatgtgcaaaagctttgaaaaagaaaaagaagatgccaaagcttcgctttgccagtagaatccggaaaattcggaagaagcaattttaaacattcttaatatgtcatcttgtttgtctttatggcttatttgcctttatggttgtatctgaagaataatatgacagcatgaggaaacaaatcattggtgatttattcaccagtttttattaatacaagtcactttttcaaaaatttggatttttttatatataactagctgctattcaaatgtgagtctaccatttttaatttatggttcaactgtttgtgagactgaattcttgcaatgcataagatataaaagcaaatatgactcactcatttcttggggtcgtattcctgatttcagaagaggatcataactgaaacaacataagacaatataatcatgtgcttttaacatatttgagaataaaaaggactagcaaataaaacacaaaaaaaaaaaaaaaaaaaaaaaaaaaaaaa

SEQ ID NO: 92 - DNA, 4264 bp, Homo sapiens
agccgccttcctatttccgcccggcgggcagcgctgcggggcgagtgccagcagagaggcgctcggtcctccctccgccctcccgcgccgggggcaggccctgcctagtctgcgtctttttcccccgcaccgcggcgccgctccgccactcgggcaccgcaggtagggcaggaggctggagagcctgctgcccgcccgcccgtaaaatggtcccctcggctggacagctcgccctgttcgctctgggtattgtgttggctgcgtgccaggccttggagaacagcacgtccccgctgagtgcagacccgcccgtggctgcagcagtggtgtcccattttaatgactgcccagattcccacactcagttctgcttccatggaacctgcaggtttttggtgcaggaggacaagccagcatgtgtctgccattctgggtacgttggtgcacgctgtgagcatgcggacctcctggccgtggtggctgccagccagaagaagcaggccatcaccgccttggtggtggtctccatcgtggccctggctgtccttatcatcacatgtgtgctgatacactgctgccaggtccgaaaacactgtgagtggtgccgggccctcatctgccggcacgagaagcccagcgccctcctgaagggaagaaccgcttgctgccactcagaaacagtggtctgaagagcccagaggaggagtttggccaggtggactgtggcagatcaataaagaaaggcttcttcaggacagcactgccagagatgcctgggtgtgccacagaccttcctacttggcctgtaatcacctgtgcagccttttgtgggccttcaaaactctgtcaagaactccgtctgcttggggttattcagtgtgacctagagaagaaatcagcggaccacgatttcaagacttgttaaaaaagaactgcaaagagacggactcctgttcacctaggtgaggtgtgtgcagcagttggtgtctgagtccacatgtgtgcagttgtcttctgccagccatggattccaggctatatatttctttttaatgggccacctccccacaacagaattctgcccaacacaggagatttctatagttattgttttctgtcatttgcctactggggaagaaagtgaaggaggggaaactgtttaatatcacatgaagaccctagctttaagagaagctgtatcctctaaccacgagaccctcaaccagcccaacatcttccatggacacatgacattgaagaccatcccaagctatcgccacccttggagatgatgtcttatttattagatggataatggttttatttttaatctcttaagtcaatgtaaaaagtataaaaccccttcagacttctacattaatgatgtatgtgttgctgactgaaaagctatactgattagaaatgtctggcctcttcaagacagctaaggcttgggaaaagtcttccagggtgcggagatggaaccagaggctgggttactggtaggaataaaggtaggggttcagaaatggtgccattgaagccacaaagccggtaaatgcctcaatacgttctgggagaaaacttagcaaatccatcagcagggatctgtcccctctgttggggagagaggaagagtgtgtgtgtctacacaggataaacccaatacatattgtactgctcagtgattaaatgggttcacttcctcgtgagccctcggtaagtatgtttagaaatagaacattagccacgagccataggcatttcaggccaaatccatgaaagggggaccagtcatttattttccattttgttgcttggttggtttgttgctttatttttaaaaggagaagtttaactttgctatttattttcgagcactaggaaaactattccagtaatttttttttcctcatttccattcaggatgccggctttattaacaaaaactctaacaagtcacctccactatgtgggtcttcctttcccctcaagagaaggagcaattgttcccctgagcatctgggtccatctgacccatggggcctgcctgtgagaaacagtgggtcccttcaaatacatagtggatagctcatccctaggaattttcattaaaatttggaaacagagtaatgaagaaataatatataaactccttatgtgaggaaatgctactaatatctgaaaagtgaaagatttctatgtattaactcttaagtgcacctagcttattacatcgtgaaaggtacatttaaaatatgttaaattggcttgaaattttcagagaattttgtcttcccctaattcttcttccttggtctggaagaacaatttctatgaattttctctttatttttttttataattcagacaattctatgacccgtgtcttcatttttggcactcttatttaacaatgccacacctgaagcacttggatctgttcagagctgaccccctagcaacgtagttgacacagctccaggtttttaaattactaaaataagttcaagtttacatcccttgggccagatatgtgggttgaggcttgactgtagcatcctgcttagagaccaatcaacggacactggtttttagacctctatcaatcagtagttagcatccaagagactttgcagaggcgtaggaatgaggctggacagatggcggaagcagaggttccctgcgaagacttgagatttagtgtctgtgaatgttctagttcctaggtccagcaagtcacacctgccagtgccctcatccttatgcctgtaacacacatgcagtgagaggcctcacatatacgcctccctagaagtgccttccaagtcagtcctttggaaaccagcaggtctgaaaaagaggctgcatcaatgcaagcctggttggaccattgtccatgcctcaggatagaacagcctggcttatttggggatttttcttctagaaatcaaatgactgataagcattggatccctctgccatttaatggcaatggtagtctttggttagctgcaaaaatactccatttcaagttaaaaatgcatcttctaatccatctctgcaagctccctgtgtttccttgccctttagaaaatgaattgttcactacaattagagaatcatttaacatcctgacctggtaagctgccacacacctggcagtggggagcatcgctgtttccaatggctcaggagacaatgaaaagcccccatttaaaaaaataacaaacattttttaaaaggcctccaatactcttatggagcctggatttttcccactgctctacaggctgtgactttttttaagcatcctgacaggaaatgttttcttctacatggaaagatagacagcagccaaccctgatctggaagacagggccccggctggacacacgtggaaccaagccagggatgggctggccattgtgtccccgcaggagagatgggcagaatggccctagagttcttttccctgagaaaggagaaaaagatgggattgccactcacccacccacactggtaagggaggagaatttgtgcttctggagcttctcaagggattgtgttttgcaggtacagaaaactgcctgttatcttcaagccaggttttcgagggcacatgggtcaccagttgctttttcagtcaatttggccgggatggactaatgaggctctaacactgctcaggagacccctgccctctagttggttctgggctttgatctcttccaacctgcccagtcacagaaggaggaatgactcaaatgcccaaaaccaagaacacattgcagaagtaagacaaacatgtatatttttaaatgttctaacataagacctgttctctctagccattgatttaccaggctttctgaaagatctagtggttcacacagagagagagagagtactgaaaaagcaactcctcttcttagtcttaataatttactaaaatggtcaacttttcattatctttattataataaacctgatgcttttttttagaactccttactctgatgtctgtatatgttgcactgaaaaggttaatatttaatgttttaatttattttgtgtggtaagttaattttgatttctgtaatgtgttaatgtgattagcagttattttccttaatatctgaattatacttaaagagtagtgagcaatataagacgcaattgtgtttttcagtaatgtgcattgttattgagttgtactgtaccttatttggaaggatgaaggaatgaatctttttttcctaaa

SEQ ID NO: 93 - DNA, 931 bp, Homo sapiens
tttcgtcggcccgccccttggcttctgcactgatggtgggtggatgagtaatgcatccaggaagcctggaggcctgtggtttccgcacccgctgccacccccgcccctagcgtggacatttatcctctagcgctcaggccctgccgccatcgccgcagatccagcgcccagagagacaccagagaacccaccatggccccctttgagcccctggcttctggcatcctgttgttgctgtggctgatagcccccagcagggcctgcacctgtgtcccaccccacccacagacggccttctgcaattccgacctcgtcatcagggccaagttcgtggggacaccagaagtcaaccagaccaccttataccagcgttatgagatcaagatgaccaagatgtataaagggttccaagccttaggggatgccgctgacatccggttcgtctacacccccgccatggagagtgtctgcggatacttccacaggtcccacaaccgcagcgaggagtttctcattgctggaaaactgcaggatggactcttgcacatcactacctgcagttttgtggctccctggaacagcctgagcttagctcagcgccggggcttcaccaagacctacactgttggctgtgaggaatgcacagtgtttccctgtttatccatcccctgcaaactgcagagtggcactcattgcttgtggacggaccagctcctccaaggctctgaaaagggcttccagtcccgtcaccttgcctgcctgcctcgggagccagggctgtgcacctggcagtccctgcggtcccagatagcctgaatcctgcccggagtggaagctgaagcctgcacagtgtccaccctgttcccactcccatctttcttccggacaatgaaataaagagttaccacccagcagaaaaaaaaaaaaaaaa

SEQ ID NO: 94 - DNA, 2207 bp, Homo sapiens
acgcacttggcgcgcggcgcgggctgcagacggctgcgaggcgctgggcacaggtgtcctgatggcaaatttcaagggccacgcgcttccagggagtttcttcctgatcattgggctgtgttggtcagtgaagtacccgctgaagtactttagccacacgcggaagaacagcccactacattactatcagcgtctcgagatcgtcgaagccgcaattaggactttgttttccgtcactgggatcctggcagagcagtttgttccggatgggccccacctgcacctctaccatgagaaccactggataaagttaatgaattggcagcacagcaccatgtacctattctttgcagtctcaggaattgttgacatgctcacctatctggtcagccacgttcccttgggggtggacagactggttatggctgtggcagtattcatggaaggtttcctcttctactaccacgtccacaaccggcctccgctggaccagcacatccactcactcctgctgtatgctctgttcggagggtgtgttagtatctccctagaggtgatcttccgggaccacattgtgctggaacttttccgaaccagtctcatcattcttcagggaacctggttctggcagattgggtttgtgctgttcccaccttttggaacacccgaatgggaccagaaggatgatgccaacctcatgttcatcaccatgtgcttctgctggcactacctggctgccctcagcattgtggccgtcaactattctcttgtttactgccttttgactcggatgaagagacacggaaggggagaaatcattggaattcagaagctgaattcagatgacacttaccagaccgccctcttgagtggctcagatgaggaatgagccgagatgcggagggcgcagatgtcccactgcacagctggaatgaatggagttcatcccctccacctgaatgcctgctgtggtctgatcttaagggtctatatatttgcacctcctcattcaacacagggctggaggttctacaacaggaaatcaggcctacagcatcctgtgtatcttgcagttgggatttttaaacatactataaagtctgtgttggtatagtacccttcataaggaaaaatgaagtaatgcctataagtagcaggcctttgtgcctcagtgtcaagagaaatcaagagatgctaaaagctttacaatggaagtggcctcatggatgaatccggggtatgagcccaggagaacgtgctgcttttggtaacttatccctttttctcttaagaaagcaggtactttcttattagaaatatgttagaatgtgtaagcaaacgacagtgcctttagaattacaattctaacttacatattttttgaaagtaaaataattcacaagctttggtattttaaaattattgttaaacatatcataactaatcataccagggtactgcaataccactgtttataagtgacaaaattaggccaaaggtgatttttttttaaatcaggaagctggttactggctctactgagagttggagccctgatgttctgattcttcaaagtcaccctaaaagaagatctgacaggaaagctgtataatgagatagaaaaacgtcaggtatggaaggctttcagttttaatatggctgaaagcaaaggataacgaattcagaattagtaatgtaaaatcttgataccctaatcttgcttctggatctgttctttttttaaaaaaacttccttcaccgcgcctataatcctagcactttgggaggccgaggcaggcagatcacggggtcaggagatcaagaccatcctggctaacatggtgaaaccccgtctctactgaaaatacaaaaaattagccgggtgtggtggcgggcgcctgtagttccagctactcgggaggctgaggcaagagaatggcatgaacccggtaggggagcttgcagtgagcccagatcatgccactgtactccagcctaggtgacagagcaagactctgtctcaaaaacaagcaaacagacttccttcaacaaatatttattaaatatccactttgcaacagcactgaaatggctgtaaggactcctgagatatgtgtccagcaaggagtttacagtcaaacaggagagacatgcctgtagttacatccagtgtgatgggtgctgagaggcaagtacaaaccacgatg

SEQ ID NO: 95 - DNA, 1723 bp, Homo sapiens
actccgaatgcgaagttctgtcttgtcatagccaagcacgctgcttcttggattgacctggcaggatggcgccaccaccagctagagtacatctaggtgcgttcctggcagtgactccgaatcccgggagcgcagcgagtgggacagaggcagccgcggccacacccagcaaagtgtggggctcttccgcggggaggattgaaccacgaggcgggggccgaggagcgctccctacctccatgggacagcacggacccagtgcccgggcccgggcagggcgcgccccaggacccaggccggcgcgggaagccagccctcggctccgggtccacaagaccttcaagtttgtcgtcgtcggggtcctgctgcaggtcgtacctagctcagctgcaaccatcaaacttcatgatcaatcaattggcacacagcaatgggaacatagccctttgggagagttgtgtccaccaggatctcatagatcagaacatcctggagcctgtaaccggtgcacagagggtgtgggttacaccaatgcttccaacaatttgtttgcttgcctcccatgtacagcttgtaaatcagatgaagaagagagaagtccctgcaccacgaccaggaacacagcatgtcagtgcaaaccaggaactttccggaatgacaattctgctgagatgtgccggaagtgcagcagagggtgccccagagggatggtcaaggtcaaggattgtacgccctggagtgacatcgagtgtgtccacaaagaatcaggcaatggacataatatatgggtgattttggttgtgactttggttgttccgttgctgttggtggctgtgctgattgtctgttgttgcatcggctcaggttgtggaggggaccccaagtgcatggacagggtgtgtttctggcgcttgggtctcctacgagggcctggggctgaggacaatgctcacaacgagattctgagcaacgcagactcgctgtccactttcgtctctgagcagcaaatggaaagccaggagccggcagatttgacaggtgtcactgtacagtccccaggggaggcacagtgtctgctgggaccggcagaagctgaagggtctcagaggaggaggctgctggttccagcaaatggtgctgaccccactgagactctgatgctgttctttgacaagtttgcaaacatcgtgccctttgactcctgggaccagctcatgaggcagctggacctcacgaaaaatgagatcgatgtggtcagagctggtacagcaggcccaggggatgccttgtatgcaatgctgatgaaatgggtcaacaaaactggacggaacgcctcgatccacaccctgctggatgccttggagaggatggaagagagacatgcaaaagagaagattcaggacctcttggtggactctggaaagttcatctacttagaagatggcacaggctctgccgtgtccttggagtgaaagactctttttaccagaggtttcctcttaggtgttaggagttaatacatattaggttttttttttttttaacatgtatacaaagtaaattcttagccaggtgtagtggctcatgcctgtaatcccagcactttgggaggctgaggcgggtggatcacttgaggtcagaagttcaagaccagcctgaccaacatcgtgaaatgccgtctttacaaaaaaatacaaaaattaactggaaaaaaaaaaaaaaa

SEQ ID NO: 96 - DNA, 4160 bp, Homo sapiens
gcgcttgcggaggattgcgttgacgagactcttatttattgtcaccaacctgtggtggaatttgcagttgcacattggatctgattcgccccgccccgaatgacgcctgcccggaggcagtgaaagtacagccgcgccgccccaagtcagcctggacacataaatcagcacgcggccggagaaccccgcaatctctgcgcccacaaaatacaccgacgatgcccgatctactttaagggctgaaacccacgggcctgagagactataagagcgttccctaccgccatggaacaacggggacagaacgccccggccgcttcgggggcccggaaaaggcacggcccaggacccagggaggcgcggggagccaggcctgggctccgggtccccaagacccttgtgctcgttgtcgccgcggtcctgctgttggtctcagctgagtctgctctgatcacccaacaagacctagctccccagcagagagcggccccacaacaaaagaggtccagcccctcagagggattgtgtccacctggacaccatatctcagaagacggtagagattgcatctcctgcaaatatggacaggactatagcactcactggaatgacctccttttctgcttgcgctgcaccaggtgtgattcaggtgaagtggagctaagtccctgcaccacgaccagaaacacagtgtgtcagtgcgaagaaggcaccttccgggaagaagattctcctgagatgtgccggaagtgccgcacagggtgtcccagagggatggtcaaggtcggtgattgtacaccctggagtgacatcgaatgtgtccacaaagaatcaggtacaaagcacagtggggaagccccagctgtggaggagacggtgacctccagcccagggactcctgcctctccctgttctctctcaggcatcatcataggagtcacagttgcagccgtagtcttgattgtggctgtgtttgtttgcaagtctttactgtggaagaaagtccttccttacctgaaaggcatctgctcaggtggtggtggggaccctgagcgtgtggacagaagctcacaacgacctggggctgaggacaatgtcctcaatgagatcgtgagtatcttgcagcccacccaggtccctgagcaggaaatggaagtccaggagccagcagagccaacaggtgtcaacatgttgtcccccggggagtcagagcatctgctggaaccggcagaagctgaaaggtctcagaggaggaggctgctggttccagcaaatgaaggtgatcccactgagactctgagacagtgcttcgatgactttgcagacttggtgccctttgactcctgggagccgctcatgaggaagttgggcctcatggacaatgagataaaggtggctaaagctgaggcagcgggccacagggacaccttgtacacgatgctgataaagtgggtcaacaaaaccgggcgagatgcctctgtccacaccctgctggatgccttggagacgctgggagagagacttgccaagcagaagattgaggaccacttgttgagctctggaaagttcatgtatctagaaggtaatgcagactctgccatgtcctaagtgtgattctcttcaggaagtcagaccttccctggtttaccttttttctggaaaaagcccaactggactccagtcagtaggaaagtgccacaattgtcacatgaccggtactggaagaaactctcccatccaacatcacccagtggatggaacatcctgtaacttttcactgcacttggcattatttttataagctgaatgtgataataaggacactatggaaatgtctggatcattccgtttgtgcgtactttgagatttggtttgggatgtcattgttttcacagcacttttttatcctaatgtaaatgctttatttatttatttgggctacattgtaagatccatctacacagtcgttgtccgacttcacttgatactatatgatatgaaccttttttgggtggggggtgcggggcagttcactctgtctcccaggctggagtgcaatggtgcaatcttggctcactatagccttgacctctcaggctcaagcgattctcccacctcagccatccaaatagctgggaccacaggtgtgcaccaccacgcccggctaattttttgtattttgtctagatataggggctctctatgttgctcagggtggtctcgaattcctggactcaagcagtctgcccacctcagactcccaaagcggtggaattagaggcgtgagcccccatgcttggccttacctttctacttttataattctgtatgttattattttatgaacatgaagaaactttagtaaatgtacttgtttacatagttatgtgaatagattagataaacataaaaggaggagacatacaatgggggaagaagaagaagtcccctgtaagatgtcactgtctgggttccagccctccctcagatgtactttggcttcaatgattggcaacttctacaggggccagtcttttgaactggacaaccttacaagtatatgagtattatttataggtagttgtttacatatgagtcgggaccaaagagaactggatccacgtgaagtcctgtgtgtggctggtccctacctgggcagtctcatttgcacccatagcccccatctatggacaggctgggacagaggcagatgggttagatcacacataacaatagggtctatgtcatatcccaagtgaacttgagccctgtttgggctcaggagatagaagacaaaatctgtctcccacgtctgccatggcatcaagggggaagagtagatggtgcttgagaatggtgtgaaatggttgccatctcaggagtagatggcccggctcacttctggttatctgtcaccctgagcccatgagctgccttttagggtacagattgcctacttgaggaccttggccgctctgtaagcatctgactcatctcagaaatgtcaattcttaaacactgtggcaacaggacctagaatggctgacgcattaaggttttcttcttgtgtcctgttctattattgttttaagacctcagtaaccatttcagcctctttccagcaaacccttctccatagtatttcagtcatggaaggatcatttatgcaggtagtcattccaggagtttttggtcttttctgtctcaaggcattgtgtgttttgttccgggactggtttgggtgggacaaagttagaattgcctgaagatcacacattcagactgttgtgtctgtggagttttaggagtggggggtgacctttctggtctttgcacttccatcctctcccacttccatctggcatcccacgcgttgtcccctgcacttctggaaggcacagggtgctgctgcctcctggtctttgcctttgctgggccttctgtgcaggacgctcagcctcagggctcagaaggtgccagtccggtcccaggtcccttgtcccttccacagaggccttcctagaagatgcatctagagtgtcagccttatcagtgtttaagatttgtcttttatttttaatttttttgagacagaatctcactctctcgcccaggctggagtgcaacggtacgatcttggctcagtgcaacctccgcctcctgggttcaagcgattctcgtgcctcagcctccggagtagctgggattgcaggcacccgccaccacgcctggctaatttttgtatttttagtagagacggggtttcaccatgttggtcaggctggtctcgaactcctgacctcaggtgatccaccttggcctccgaaagtgctgggattacaggcgtgagccaccagccaggccaagctattcttttaaagtaagcttcctgacgacatgaaataattgggggttttgttgtttagttacattaggctttgctatatccccaggccaaatagcatgtgacacaggacagccatagtatagtgtgtcactcgtggttggtgtcctttcatgcttctgccctgtcaaaggtccctatttgaaatgtgttataatacaaacaaggaagcacattgtgtacaaaatacttatgtatttatgaatccatgaccaaattaaatatgaaaccttatataaaaaaaaaaaaaaaaaaa

SEQ ID NO: 97 - DNA, 998 bp, Homo sapiens
gcggcgggcgcagacagcggcgggcgcaggacgtgcactatggctcggggctcgctgcgccggttgctgcggctcctcgtgctggggctctggctggcgttgctgcgctccgtggccggggagcaagcgccaggcaccgccccctgctcccgcggcagctcctggagcgcggacctggacaagtgcatggactgcgcgtcttgcagggcgcgaccgcacagcgacttctgcctgggctgcgctgcagcacctcctgcccccttccggctgctttggcccatccttgggggcgctctgagcctgaccttcgtgctggggctgctttctggctttttggtctggagacgatgccgcaggagagagaagttcaccacccccatagaggagaccggcggagagggctgcccagctgtggcgctgatccagtgacaatgtgccccctgccagccggggctcgcccactcatcattcattcatccattctagagccagtctctgcctcccagacgcggcgggagccaagctcctccaaccacaaggggggtggggggcggtgaatcacctctgaggcctgggcccagggttcaggggaaccttccaaggtgtctggttgccctgcctctggctccagaacagaaagggagcctcacgctggctcacacaaaacagctgacactgactaaggaactgcagcatttgcacaggggaggggggtgccctccttccttaggacctgggggccaggctgacttggggggcagacttgacactaggccccactcactcagatgtcctgaaattccaccacgggggtcaccctggggggttagggacctatttttaacactaggggctggcccactaggagggctggccctaagatacagacccccccaactccccaaagcggggaggagatatttattttggggagagtttggaggggagggagaatttattaataaaagaatctttaactttaaaaaaaaaaaaaaaaa

SEQ ID NO: 98 - DNA, 4090 bp, Homo sapiens
ggactctgagtcgtcttggtcccaggagccagtagtgaaggcaacagtctgcccacctgtggacaccagatcctgggagctcctggttagcaagtgagatctctgggatgtcagtgaggctggttgaagaccagaggtaaactgcagaggtcaccacccccaccatgtcccaggtgatgtccagcccactgctggcaggaggccatgctgtcagcttggcgccttgtgatgagcccaggaggaccctgcacccagcacccagccccagcctgccaccccagtgttcttactacaccacggaaggctggggagcccaggccctgatggcccccgtgccctgcatggggccccctggccgactccagcaagccccacaggtggaggccaaagccacctgcttcctgccgtcccctggtgagaaggccttggggaccccagaggaccttgactcctacattgacttctcactggagagcctcaatcagatgatcctggaactggaccccaccttccagctgcttcccccagggactgggggctcccaggctgagctggcccagagcaccatgtcaatgagaaagaaggaggaatctgaagccttggacataaagtacatcgaggtgacctccgccagatcaaggtgccacgatggcccccagcactgctccagcccctctgtcaccccgcccttcggctcccttcgcagtggtggcctcctcctttccagagacgtcccccgagagacacgaagcagcagtgagagcctcatcttctctgggaaccagggcagggggcaccagcgccctctgcccccctcagagggtctctcccctcgacccccaaattcccccagcatctcaatcccttgcatggggagcaaggcctcgagcccccatggtttgggctccccgctggtggcttctccaagactggagaagcggctgggaggcctggccccacagcggggcagcaggatctctgtgctgtcagccagcccagtgtctgatgtcagctatatgtttggaagcagccagtccctcctgcactccagcaactccagccatcagtcatcttccagatccttggaaagtccagccaactcttcctccagcctccacagccttggctcagtgtccctgtgtacaagacccagtgacttccaggctcccagaaaccccaccctaaccatgggccaacccagaacaccccactctccaccactggccaaagaacatgccagcagctgccccccatccatcaccaactccatggtggacatacccattgtgctgatcaacggctgcccagaaccagggtcttctccaccccagcggaccccaggacaccagaactccgttcaacctggagctgcttctcccagcaacccctgtccagccaccaggagcaacagccagaccctgtcagatgccccctttaccacatgcccagagggtcccgccagggacatgcagcccaccatgaagttcgtgatggacacatctaaatactggtttaagccaaacatcacccgagagcaagcaatcgagctgctgaggaaggaggagccaggggcttttgtcataagggacagctcttcataccgaggctccttcggcctggccctgaaggtgcaggaggttcccgcgtctgctcagagtcgaccaggtgaggacagcaatgacctcatccgacacttcctcatcgagtcgtctgccaaaggagtgcatctcaaaggagcagatgaggagccctactttgggagcctctctgccttcgtgtgccagcattccatcatggccctggccctgccctgcaaactcaccatcccacagagagaactgggaggtgcagatggggcctcggactctacagacagcccagcctcctgccagaagaaatctgcgggctgccacaccctgtacctgagctcagtgagcgtggagaccctgactggagccctggccgtgcagaaagccatctccaccacctttgagagggacatcctccccacgcccaccgtggtccacttcaaagtcacagagcagggcatcactctgactgatgtccagaggaaggtgtttttccggcgccattacccactcaccaccctccgcttctgtggtatggaccctgagcaacggaagtggcagaagtactgcaaaccctcctggatctttgggtttgtggccaagagccagacagagcctcaggagaacgtatgccacctctttgcggagtatgacatggtccagccagcctcgcaggtcatcggcctggtgactgctctgctgcaggacgcagaaaggatgtaggggagagactgcctgtgcacctaaccaacacctccaggggctcgctaaggagcccccctccaccccctgaatgggtgtggcttgtggccatattgacagaccaatctatgggactagggggattggcatcaagttgacacccttgaacctgctatggccttcagcagtcaccatcatccagaccccccgggcctcagtttcctcaatcatagaagaagaccaatagacaagatcagctgttcttagatgctggtgggcatttgaacatgctcctccatgattctgaagcatgcacacctctgaagacccctgcatgaaaataacctccaaggaccctctgaccccatcgacctgggccctgcccacacaacagtctgagcaagagacctgcagcccctgtttcgtggcagacagcaggtgcctggcggtgacccacggggctcctggcttgcagctggtgatggtcaagaactgactacaaaacaggaatggatagactctatttccttccatatctgttcctctgttccttttcccactttctgggtggctttttgggtccacccagccaggatgctgcaggccaagctgggtgtggtatttagggcagctcagcagggggaacttgtccccatggtcagaggagacccagctgtcctgcacccccttgcagatgagtatcaccccatcttttctttccacttggtttttatttttatttttttttgagacagagtctcactgtcacccaggctgaactgcagtggtgtgatctaggctcactgcaacctccacctcccaggttcaagcaattatcctgcctcaggctcccaagtagctgggattacaggcatgtgcaactcacccagctaattttgtatttttagtagagacagggtttcaccatgttggccaggctggtcttgaactcctgaccgcaggtaatccacctgcttcggcctcccaaagtgctgggattacaggcgcaagccacccagcccagcttctttccattccttgataggcgagtattccaaagctggtatcgtagctgccctaatgttgcatattaggcggcgggggcagagataagggccatctctctgtgattctgcctcagctcctgtcttgctgagccctcccccaacccacgctccaacacacacacacacacacacacacacacacacacacacacacacacacacacacacacacgcccctctactgctatgtggcttcaaccagcctcacagccacacgggggaagcagagagtcaagaatgcaaagaggccgcttccctaagaggcttggaggagctgggctctatcccacacccacccccaccccacccccacccagcctccagaagctggaaccatttctcccgcaggcctgagttcctaaggaaaccaccctaccggggtggaagggagggtcagggaagaaacccactcttgctctacgaggagcaagtgcctgccccctcccagcagccagccctgccaaagttgcattatctttggccaaggctgggcctgacggttatgatttcagccctgggcctgcaggagaggctgagaccagcccacccagccagtggtcgagcactgccccgccgccaaagtctgcagaatgtgagatgaggttctcaaggtcacaggccccagtcccagcctgggggctggcagaggcccccatatactctgctacagctcctatcatgaaaaataaaatgtttgtctttgcaaaacagtaaaaaaaaaaaaaaaaaaaa

SEQ ID NO: 99 - DNA, 3824 bp, Homo sapiens
actgcctctctcacagccctcaagacacaccatgggcccagaggcaggtttgctacacagcagcgacgacgcaggcggcggccccagcgactcgcaactgcctccctgaccacagcggccaccgcccaacacccccgagaagccatcgccaccaccggcaggagaacctagggtccataaagccatcttcgcgatcgactaaagctacgtcaacaactatggcgggcgacgggcggcgggcagaggcggtgcgggaaggatggggtgtgtacgtcacccccagggcccccatccgagagggaaggggccggctcgcccctcaaaatggcggcagcagcgatgcgcctgcgtacagaactcctccgtcgcgccagggccggcgggaagtgaggttctcggacgagccgccagaagtgtacggcgacttcgagcccctggtggccaaagaaaggtccccggtgggaaaacgaacccggctagaagagttccggtccgattctgcgaaagaggaagtgagagaaagcgcgtactaccttcggtctaggcagcggaggcagccgcgaccccaggaaaccgaggaaatgaagacgcgaaggactacccgccttcagcagcagcactcagagcagcctccgctacagccgtctcctgttatgaccaggagagggctgcgggactctcattcctctgaagaggatgaagcatcttcccaaactgatttaagccaaacgatctcaaagaaaactgtcaggagcatacaagaggctccagtgagtgaagatcttgtaatcaggttacgtcgaccccctctaagatacccaagatatgaagccaccagtgtccaacagaaggtcaatttctctgaagaaggagaaactgaagaagatgatcaagacagctctcacagcagtgtcactactgttaaggccagatccagggattctgatgaatctggagataaaaccaccagatcatctagtcaatatatagaatcattttggcagtcatcacaaagtcaaaacttcacagctcatgataagcaaccttcagtgctaagctcaggatatcaaaaaactccccaggaatgggccccacaaactgcaagaataaggaccaggatgcaaaatgacagcattctgaaatcagagcttggaaaccagtcaccatcaacctccagccgacaagtgactggacaaccccaaaatgcatcttttgtcaagaggaaccggtggtggctacttcctctgatagctgctcttgcctctgggagtttttggttctttagtactcctgaggtagaaaccactgctgttcaagagttccagaaccagatgaatcaacttaagaataagtaccaaggtcaagatgagaagctgtggaaaaggagccaaacattcctggaaaaacatcttaatagctcccatcctcggtctcagcctgctatcttactgctcactgctgcccgagatgctgaagaagcacttaggtgtctgagtgaacaaattgctgatgcctattcttcttttcgtagtgtccgtgccatccggattgatgggacagataaagctactcaagacagtgatactgtcaaactagaggtagaccaagaactgagcaatggatttaagaatggccagaatgcagctgtggtacaccgctttgagtcatttcccgcaggctctactttgatcttctacaaatattgtgaccatgaaaacgcggccttcaaagatgtagccttagtcctgactgtcttattggaggaagagacacttggaacaagtctaggcctaaaggaagttgaagaaaaagtaagagattttcttaaagtcaagttcaccaattctaacacacccaactcctacaatcatatggacccagacaaactgaatggcctctggagccgtatttctcacttagttctgcctgtgcaacctgaaaatgccctgaaaaggggcatctgcttataagaagtgagagagaagaaaaatcatgtcccaagttctgagaattgttcacactttctaaccagagacagaattcagagctctttttgaaagaactagtttctttttaaagaagttaagtgcttacataaacatggaacatataaatcattcattcaacctaattatctgtgatatgagagaatcatttcagtttccattgagagctctgttaaaggtatcttaggagtgcagattatatgcagttccttagagaatctgttttgattctgggctgagttattacagttatggtatgaccagtgagagggatttgtgtcctttcttatgaaccttcctgattttttaacttagatttctcactaagtttcctgagttattagtaagattgctccctaaatgtaaccagggattttcccattatgttcccttttataccatttaggtgtgagttccttagcttctgcctataggaacataagtaatgaaaggtcatctaggtgtgtgtttggaatttttttcttttgttttttggaaaatggaaagaacaaggcaaggaaggaaaattaatggggaagctgaagggaggaaatgttacagtaatccactgagatgtagtttagtcaaacataggtatatgaactgttaatcttggtggattccgttgggatttgttttttacatctcctttttccttccttgaagaaaaattcttggctgtcccaaggattcttcatgtatattgcaaaatttaatatatttgttcacttgagtcttaagagtaggtcaggccaaggcaggtggatcacctgaggtcagaagttcaagaccagcctggccaacatggtgaaaccccgtctctactaaaaatacaaaaattagctgggcgtggtggtgcatgcctgaaatcccagctacttgggaggctgaggcaggagaattgcttgaacccgggaggcggaggttgcagtaagccgagaccatgcttattgccctccagtctgggcaacaaaaatgaaactccgtctcaaaaaaaaaaaagtaggtcaattcgtaacagtttattttggacacaccctgaagcttttgttttgaattaagaaatgagtttcaggaattgacaaaccatttgttaaccagctgtcctgggctattgaagaagatttcattttccgcgcatccacttgttgcagtccaagtcctctagtgcaacgccatagcaaatataaagatttactatgcacgtgatacattttatggagtgcctcaagccaagatagtgaatttatatgaagggtgtgaaatgtatttctttactactatagtagtttagttataactttgcatctataattgagctttctcatctgtcaaatgctatggttttcttaaaatgttacaattctagatctatccaccttgtttttttattgtctacaaaccattaaatgtaaatattgtttttagagtcagtcattggctttgtcatttaccctttgagagttccacaagtggtagtagagtggtttaacgtctttcctctagtactaccagtattcataaatgtataccccttactgtaatttgttcctcttagaagtcagatcatctgatttatagaggattatgaaaaccagagtttttgaaaaggcttattttatacatacgtattatatagagaaacaaatgtttttattaaatgtttcattgacccaagtaatttaaaagtaatatgttacctatgtctttcaggaaaaataattatagcagctgatctgtaaatgactttaaaagctattttagtaatttaaataaatttactttcttggtttatactctcaaaaaaaaaaaaaaaaa

SEQ ID NO: 100 - DNA, 1791 bp, Homo sapiens
gagcccggctgcggatctgggaagcgcctcttcacggcactgggatccgcatctgcctgggatcatcaagccctagaagctgggtttctttaaattagggctgccgttttctgtttctccctgggctgcggaaagccagaagattttatctagcttatacaaggctgctggtgttccctctttttttccacgagggtgtttttggctgcaattgcatgaaatcccaatggtgtagaccagtggcgatggatctaggagtttaccaactgagacatttttcaatttctttcttgtcatccttgctggggactgaaaacgcttctgtgagacttgataatagctcctctggtgcaagtgtggtagctattgacaacaaaatcgagcaagctatggatctagtgaaaagccatttgatgtatgcggtcagagaagaagtggaggtcctcaaagagcaaatcaaagaactaatagagaaaaattcccagctggagcaggagaacaatctgctgaagacactggccagtcctgagcagcttgcccagtttcaggcccagctgcagactggctccccccctgccaccacccagccacagggcaccacacagccccccgcccagccagcatcgcagggctcaggaccaaccgcatagctgcctatgcccccgcagaactggctgctgcgtgtgaactgaacagacggagaagatgtgctagggagaatctgcctccacagtcacccatttcattgctcgctgcgaaagagacgtgagactgacatatgccattatctcttttccagtattaaacactcatatgcttatggcttggagaaatttcttagttgggtgaattaaaggttaatccgagaattagcatggatataccgggacctcatgcagcttggcagatatctgagaaatggtttaattcatgctcaggagctgtgtgcctttccatcccttccggctccctacccctcacttccaagggttctctctcctgcttgcgcttagtgtcctacatggggttgtgaagcgatggagctcctcactggactcgcctctctcctctcctccccccaggaggaacttgaaaggagggtaaaaagactaaaatgagggggaacagagttcactgtacaaatttgacaactgtcaccaaaattcataaaaaacaatagtactgtgcctctttcttctcaaacaatggatgacacaaaactatgagagtgacaaaatggtgacaggtagctgggacctaggctatcttaccatgaaggttgttttgcttattgtatatttgtgtatgtagtgtaactattttgtacaatagaggactgtaactactatttaggttgtacagattgaaatttagttgtttcattggctgtctgaggaggtgtggacttttatatatagatctacataaaaactgctacatgacaaaaaccacacctaaagaaattttaagaatttggcacagttactcactttgtgtaatctgaaatctagctgctgaatacgctgaagtaaatccttgttcactgaagtctttcaattgagctggttgaatactttgaaaaatgctcagttctaactaatgaaatggatttcccagtaggggtttctgcatatcacctgtatagtagttatatgcatatgtttctgtgcatgttctctacacaattgtaaggtgtcactgtatttaactgttgcacttgtcaactttcaataaagcatataaatgttgataaaaaaaaaaaaaaaaaaaaaaaaaaaaaaaaaaaaaaaa

SEQ ID NO: 101 - DNA, 1514 bp, Homo sapiens
agttctcactgagacctgtcaccccgactcaacgtgagacgcaccgcccggactcaccatgcgtgaatgcatctcagtccacgtggggcaggcaggtgtccagatgggcaatgcctgctgggagctctattgcttggaacatgggattcagcctgatgggcagatgcccagtgacaagaccattggtggaggggacgactccttcaccaccttcttctgtgaaactggtgctggaaaacacgtaccccgggcagtttttgtggatctggagcctacggtcattgatgagatccgaaatggcccataccgacagctcttccacccagagcagctcatcactgggaaagaggatgctgccaacaactatgcccgtggtcactataccattggcaaggagatcattgacccagtgctggatcggatccgcaagctgtctgaccagtgcacaggacttcagggcttcctggtgttccacagctttggtgggggcactggctctggcttcacctcactcctgatggagcggctctctgttgactatggcaagaaatccaagctggaattctccatctacccagccccccaggtgtctacagccgtggtcgagccctacaactctatcctgaccacccacaccaccctggagcactcagactgtgccttcatggtggacaacgaagcaatctatgacatctgccgccgcaacctagacatcgagcgcccaacctacaccaacctcaatcgcctcattagccaaattgtctcctccatcacagcttctctgcgctttgacggggccctcaatgtggacctgacagagttccagaccaacctggtgccctaccctcgcatccacttccccctggccacctatgcaccagtcatctctgcagaaaaggcataccacgagcagctgtcggtggcagagatcaccaatgcctgctttgagcctgccaaccagatggtaaagtgtgatccccggcacggcaagtacatggcctgctgcctgctgtaccgtggagatgtggtgcccaaggatgtcaacgctgccattgccgccatcaagaccaagcgcagcattcagtttgtggactggtgccccacaggcttcaaggttggtatcaactaccagcctcccactgtggtgcctgggggtgacctggccaaggtgcagcgtgccgtgtgcatgctgagcaacacgaccgccatcgccgaggcctgggcccgcctggaccacaagttcgacctgatgtatgccaagagggcgtttgtgcactggtatgtgggtgagggcatggaggagggtgagttctccgaggcccgtgaggatatggctgccctggagaaggattatgaggaggtgggcatcgactcctatgaggacgaggatgagggagaagaataaagcagctgcctggagcctattcactatgtttattgcaaaatcctttcgaaataaacagtttccttgcacggttaaaaaaaaaaaaaaaaaaaaaaaaaaaaaaaaaaaa

SEQ ID NO: 102 - DNA, 2344 bp, Homo sapiens
cggccgcctccgcgtccgcgtcgtcgtctgtgctcccggcgctgacgtgtctgggcggtcggcttccactccttcaggcgtcggcagccactagtcgtggcgagaggggcggggtggccggggctggcgctccacttggcccccgctcccggcccgccccgccgccgcggccccccggatgagggtatatattcggagcgagcgcgggacgccgatgagtggccgcgcggaaggagctggagacggtcgtagctgcggtcgcgccgagaaaggtttacaggtacatacattacacccctatttctacaaagcttggctattagagcattatgaacattaatgacctcaaactcacgttgtccaaagctgggcaagagcacctactacgtttctggaatgagcttgaagaagcccaacaggtagaactttatgcagagctccaggccatgaactttgaggagctgaacttctttttccaaaaggccattgaaggttttaaccagtcttctcaccaaaagaatgtggatgcacgaatggaacctgtgcctcgagaggtattaggcagtgctacaagggatcaagatcagctccaggcctgggaaagtgaaggacttttccagatttctcagaataaagtagcagttcttcttctagctggtgggcaggggacaagactcggcgttgcatatcctaaggggatgtatgatgttggtttgccatcccgtaagacactttttcagattcaagcagagcgtatcctgaagctacagcaggttgctgaaaaatattatggcaacaaatgcattattccatggtatataatgaccagtggcagaacaatggaatctacaaaggagttcttcaccaagcacaagtactttggtttaaaaaaagagaatgtaatcttttttcagcaaggaatgctccccgccatgagttttgatgggaaaattattttggaagagaagaacaaagtttctatggctccagatgggaatggtggtctttatcgggcacttgcagcccagaatattgtggaggatatggagcaaagaggcatttggagcattcatgtctattgtgttgacaacatattagtaaaagtggcagacccacggttcattggattttgcattcagaaaggagcagactgtggagcaaaggtggtagagaaaacgaaccctacagaaccagttggagtggtttgccgagtggatggagtttaccaggtggtagaatatagtgagatttccctggcaacagctcaaaaacgaagctcagacggacgactgctgttcaatgcggggaacattgccaaccatttcttcactgtaccatttctgagagatgttgtcaatgtttatgaacctcagttgcagcaccatgtggctcaaaagaagattccttatgtggatacccaaggacagttaattaagccagacaaacccaatggaataaagatggaaaaatttgtctttgacatcttccagtttgcaaagaagtttgtggtatatgaagtattgcgagaagatgagttttccccactaaagaatgctgatagtcagaatgggaaagacaaccctactactgcaaggcatgctttgatgtcccttcatcattgctgggtcctcaatgcagggggccatttcatagatgaaaatggctctcgccttccagcaattccccgcttgaaggatgccaatgatgtaccaatccaatgtgaaatctctcctcttatctcctatgctggagaaggattagaaagttatgtggcagataaagaattccatgcacctctaatcatcgatgagaatggagttcatgagctggtgaaaaatggtatttgaaccagataccaagttttgtttgccacgataggaatagcttttatttttgatagaccaactgtgaacctacaagacgtcttggacaactgaagtttaaatatccacagggttttattttgcttgttgaactcttagagctattgcaaacttcccaagatccagatgactgaatttcagatagcatttttatgattcccaactcattgaaggtcttatttatataattttttccaagccaaggagaccattggccatccaggaaatttcgtacagctgaaatataggcaggatgttcaacatcagtttacttgcagctggaagcatttgtttttgaagttgtacatagtaataatatgtcattgtacatgttgaaaggtttctatggtactaaaagtttgttttattttatcaaacattaagcttttttaagaaaataattgggcagtgaaataaatgtatcttcttgtctctggagtgtcaaaaaaaaaaaaaaaaaa

SEQ ID NO: 103 - DNA, 1857 bp, Homo sapiens
caccgggccagggctggttccacgctgtcatttctctccgctggccccagccgcggggccaccgccagacagacagaccggggatcctgcctggcggcgtgaccttgggttagtcctagagccgcttctagcccggtttcctccgccccaggttaggaccacgtgggtggttccctcattcgagtgctccggcgcacagacccgcgccccgccgtctgcgagcctcccgagagccgtcccttcgtccggccctggagcattgcgtttgtcgccggtgtcgcagtgcgaggatggcgccgcgggtgtagcggctctctgcgcaggccgagtgggcccagagaagcgaggaactccgcagctcgtcgacacgtctcgtctcctgtcccaattcagggcttggtgaggtgactcgcggtcgcgggtgactcgccggcaggacactgcctggaacgcctggagcgcctcccactgcagacgtctgtccgcctccagccgctctcctctgacgggtcctgcctcagttggcggaatggcggccacgggagccaatgcagagaaagctgaaagtcacaatgattgccccgtcagacttttaaatccaaacatagcaaaaatgaaagaagatattctctatcatttcaatctcaccactagcagacacaatttcccagccttgtttggagatgtgaagtttgtgtgtgttggtggaagcccctcccggatgaaagccttcatcaggtgcgttggtgcagagctgggccttgactgcccaggtagagactatcccaacatctgtgcgggaactgaccgctatgccatgtataaagtaggaccggtgctgtctgtcagtcatggtatgggcattccttctatctcaatcatgttgcatgagctcataaagctgctgtactatgcccggtgctccaacgtcactatcatccgcattggcacttctggtgggataggtctggagcccggcactgtggtcataacagagcaggcagtggatacctgcttcaaggcagagtttgagcagattgtcctggggaagcgggtcatccggaaaacggaccttaacaagaagctggtgcaggagctgttgctgtgttctgcagagctgagcgagttcaccacagtggtggggaacaccatgtgcaccttggacttctatgaagggcaaggccgtctggatggggctctctgctcctacacggagaaggacaagcaggcgtatctggaggcagcctatgcagccggcgtccgcaatatcgagatggagtcctcggtgtttgccgccatgtgcagcgcctgcggcctccaagcggccgtggtgtgtgtcaccctcctgaaccgcctggaaggggaccagatcagcagccctcgcaatgtgctcagcgagtaccagcagaggccgcagcggctggtgagctacttcatcaagaagaaactgagcaaggcctgagcgctgccctgcacctccgcagacctgctgtgatgacttgccattaaaagcattgtccaaaatcccctgttgtgtggactttgagcacactttacacaagaatctagaaaatcagatcgcgattaagagacagagaatcttggattaaccgcatgggagatgttcttccttttgaagtttcattggagcattttcaatgatgttagcctgatttggggtttcttcaagaacattctaccaaatttttgtactatttctagggaaatttttcagactttaaaattctaatggtagtcagatttcatgtcactaaacaagaaatctgacaatagtgccaggaaactaatttcctgatacattaaaaaaattccatgcaaaaaaaaaaaaaaaaaaaa

SEQ ID NO: 104 - DNA, 3614 bp, Homo sapiens
ggcttggggcagccgggtagctcggaggtcgtggcgctgggggctagcaccagcgctctgtcgggaggcgcagcggttaggtggaccggtcagcggactcaccggccagggcgctcggtgctggaatttgatattcattgatccgggttttatccctcttcttttttcttaaacatttttttttaaaactgtattgtttctcgttttaatttatttttgcttgccattccccacttgaatcgggccgacggcttggggagattgctctacttccccaaatcactgtggattttggaaaccagcagaaagaggaaagaggtagcaagagctccagagagaagtcgaggaagagagagacggggtcagagagagcgcgcgggcgtgcgagcagcgaaagcgacaggggcaaagtgagtgacctgcttttgggggtgaccgccggagcgcggcgtgagccctcccccttgggatcccgcagctgaccagtcgcgctgacggacagacagacagacaccgcccccagccccagctaccacctcctccccggccggcggcggacagtggacgcggcggcgagccgcgggcaggggccggagcccgcgcccggaggcggggtggagggggtcggggctcgcggcgtcgcactgaaacttttcgtccaacttctgggctgttctcgcttcggaggagccgtggtccgcgcgggggaagccgagccgagcggagccgcgagaagtgctagctcgggccgggaggagccgcagccggaggagggggaggaggaagaagagaaggaagaggagagggggccgcagtggcgactcggcgctcggaagccgggctcatggacgggtgaggcggcggtgtgcgcagacagtgctccagccgcgcgcgctccccaggccctggcccgggcctcgggccggggaggaagagtagctcgccgaggcgccgaggagagcgggccgccccacagcccgagccggagagggagcgcgagccgcgccggccccggtcgggcctccgaaaccatgaactttctgctgtcttgggtgcattggagccttgccttgctgctctacctccaccatgccaagtggtcccaggctgcacccatggcagaaggaggagggcagaatcatcacgaagtggtgaagttcatggatgtctatcagcgcagctactgccatccaatcgagaccctggtggacatcttccaggagtaccctgatgagatcgagtacatcttcaagccatcctgtgtgcccctgatgcgatgcgggggctgctgcaatgacgagggcctggagtgtgtgcccactgaggagtccaacatcaccatgcagattatgcggatcaaacctcaccaaggccagcacataggagagatgagcttcctacagcacaacaaatgtgaatgcagaccaaagaaagatagagcaagacaagaaaaaaaatcagttcgaggaaagggaaaggggcaaaaacgaaagcgcaagaaatcccggtataagtcctggagcgttccctgtgggccttgctcagagcggagaaagcatttgtttgtacaagatccgcagacgtgtaaatgttcctgcaaaaacacagactcgcgttgcaaggcgaggcagcttgagttaaacgaacgtacttgcagatgtgacaagccgaggcggtgagccgggcaggaggaaggagcctccctcagggtttcgggaaccagatctctcaccaggaaagactgatacagaacgatcgatacagaaaccacgctgccgccaccacaccatcaccatcgacagaacagtccttaatccagaaacctgaaatgaaggaagaggagactctgcgcagagcactttgggtccggagggcgagactccggcggaagcattcccgggcgggtgacccagcacggtccctcttggaattggattcgccattttatttttcttgctgctaaatcaccgagcccggaagattagagagttttatttctgggattcctgtagacacacccacccacatacatacatttatatatatatatattatatatatataaaaataaatatctctattttatatatataaaatatatatattctttttttaaattaacagtgctaatgttattggtgtcttcactggatgtatttgactgctgtggacttgagttgggaggggaatgttcccactcagatcctgacagggaagaggaggagatgagagactctggcatgatcttttttttgtcccacttggtggggccagggtcctctcccctgcccaggaatgtgcaaggccagggcatgggggcaaatatgacccagttttgggaacaccgacaaacccagccctggcgctgagcctctctaccccaggtcagacggacagaaagacagatcacaggtacagggatgaggacaccggctctgaccaggagtttggggagcttcaggacattgctgtgctttggggattccctccacatgctgcacgcgcatctcgcccccaggggcactgcctggaagattcaggagcctgggcggccttcgcttactctcacctgcttctgagttgcccaggagaccactggcagatgtcccggcgaagagaagagacacattgttggaagaagcagcccatgacagctccccttcctgggactcgccctcatcctcttcctgctccccttcctggggtgcagcctaaaaggacctatgtcctcacaccattgaaaccactagttctgtccccccaggagacctggttgtgtgtgtgtgagtggttgaccttcctccatcccctggtccttcccttcccttcccgaggcacagagagacagggcaggatccacgtgcccattgtggaggcagagaaaagagaaagtgttttatatacggtacttatttaatatccctttttaattagaaattaaaacagttaatttaattaaagagtagggttttttttcagtattcttggttaatatttaatttcaactatttatgagatgtatcttttgctctctcttgctctcttatttgtaccggtttttgtatataaaattcatgtttccaatctctctctccctgatcggtgacagtcactagcttatcttgaacagatatttaattttgctaacactcagctctgccctccccgatcccctggctccccagcacacattcctttgaaataaggtttcaatatacatctacatactatatatatatttggcaacttgtatttgtgtgtatatatatatatatatgtttatgtatatatgtgattctgataaaatagacattgctattctgttttttatatgtaaaaacaaaacaagaaaaaatagagaattctacatactaaatctctctccttttttaattttaatatttgttatcatttatttattggtgctactgtttatccgtaataattgtggggaaaagatattaacatcacgtctttgtctctagtgcagtttttcgagatattccgtagtacatatttatttttaaacaacgacaaagaaatacagatatatcttaaaaaaaaaaaagcattttgtattaaagaatttaattctgatctcaaaaaaaaaaaaa

SEQ ID NO: 105 - DNA, 1745 bp, Homo sapiens
agcctgacttcagcgctcccactctcggccgacacccctcatggccaaccgttacaccatggatctgactgccatctacgagagcctcctgtcgctgagccctgacgtgcccgtgccatccgaccatggagggactgagtccagcccaggctggggctcctcgggaccctggagcctgagcccctccgactccagcccgtctggggtcacctcccgcctgcctggccgctccaccagcctagtggagggccgcagctgtggctgggtgcccccaccccctggcttcgcaccgctggctccccgcctgggccctgagctgtcaccctcacccacttcgcccactgcaacctccaccaccccctcgcgctacaagactgagctatgtcggaccttctcagagagtgggcgctgccgctacggggccaagtgccagtttgcccatggcctgggcgagctgcgccaggccaatcgccaccccaaatacaagacggaactctgtcacaagttctacctccagggccgctgcccctacggctctcgctgccacttcatccacaaccctagcgaagacctggcggccccgggccaccctcctgtgcttcgccagagcatcagcttctccggcctgccctctggccgccggacctcaccaccaccaccaggcctggccggcccttccctgtcctccagctccttctcgccctccagctccccaccaccacctggggaccttccactgtcaccctctgccttctctgctgcccctggcacccccctggctcgaagagaccccaccccagtctgttgcccctcctgccgaagggccactcctatcagcgtctgggggcccttgggtggcctggttcggaccccctctgtacagtccctgggatccgaccctgatgaatatgccagcagcggcagcagcctggggggctctgactctcccgtcttcgaggcgggagtttttgcaccaccccagcccgtggcagccccccggcgactccccatcttcaatcgcatctctgtttctgagtgacaaagtgactgcccggtcagatcagctggatctcagcggggagccacgtctcttgcactgtggtctctgcatggaccccagggctgtggggacttgggggacagtaatcaagtaatccccttttccagaatgcattaacccactcccctgacctcacgctggggcaggtccccaagtgtgcaagctcagtattcatgatggtgggggatggagtgtcttccgaggttcttgggggaaaaaaaattgtagcatatttaagggaggcaatgaaccctctcccccacctcttccctgcccaaatctgtctcctagaatcttatgtgctgtgaataataggccttcactgcccctccagtttttatagacctgaggttccagtgtctcctggtaactggaacctctcctgagggggaatcctggtgctcaaattaccctccaaaagcaagtagccaaagccgttgccaaaccccacccataaatcaatgggccctttatttatgacgactttatttattctaatatgattttatagtatttatatatattgggtcgtctgcttcccttgtatttttcttcctttttttgtaatattgaaaacgacgatataattattataagtagactataatatatttagtaatatatattattaccttaaaagtctatttttgtgttttgggcatttttaaataaacaatctgagtgt

SEQ ID NO: 106 - DNA, 60 bp, Homo sapiens
ctttatggaaagggctatgtgggagagtcagctatcttgtctggttttcttgagacctca

SEQ ID NO: 107 - DNA, 60 bp, Homo sapiens
cttcagttgttttcccgagcaaaggtctaaagtttacagtaaataaaatgtttgaccatg

SEQ ID NO: 108 - DNA, 60 bp, Homo sapiens
ggcgccaatggtatctgggcggagctcacagagttcttggaataaaagcaacctcagaac

SEQ ID NO: 109 - DNA, 60 bp, Homo sapiens
tatgtgacaatgatgacacagccatggctgcatttatgaattacttagaagcagaggggg

SEQ ID NO: 110 - DNA, 60 bp, Homo sapiens
atgaactgggaagagatgaaatgttttttcatatttaaataaataagaacattaaaaagc

SEQ ID NO: 111 - DNA, 60 bp, Homo sapiens
gggcacctttcaacatcatttgcttccttatctacagttgattcagaaatctgcattttt

SEQ ID NO: 112 - DNA, 60 bp, Homo sapiens
ccacttaaaatctgcttatggcacaatttgcctcaaaatccattccaagttgtatatttg

SEQ ID NO: 113 - DNA, 60 bp, Homo sapiens
aaatcaagcctgaggctggtgaacagtagctacacacccatattgtgtgttctgtgaatg

SEQ ID NO: 114 - DNA, 60 bp, Homo sapiens
accacactatcttctgtatcaggtagtctaatagaaatatacctgttttgttctaaaaaa

SEQ ID NO: 115 - DNA, 60 bp, Homo sapiens
gtctcctaaattgttgtaattgcattataaaataagaaaaacattaataagacaaatatt

SEQ ID NO: 116 - DNA, 60 bp, Homo sapiens
gccaaactaaacttgctgcttaatgatttgctcacatctagtaaaacatggagtatttgt

SEQ ID NO: 117 - DNA, 60 bp, Homo sapiens
tgatgccgtgcactgtgtgaagcagatgtttttgtccggaaataaaaataatagtcttgg

SEQ ID NO: 118 - DNA, 60 bp, Homo sapiens
tagatgatatttattgcagaatttctattcttgtattaacaaataaaatgcttgccccag

SEQ ID NO: 119 - DNA, 60 bp, Homo sapiens
taagacagttttgtatcattttgctaaaaattattggcttaaatctgtgtaaagaaaaaa

SEQ ID NO: 120 - DNA, 60 bp, Homo sapiens
gtaaggcatactgccttgtttaatggtagttttacagtgtttctggcttagaacaaaggg

SEQ ID NO: 121 - DNA, 60 bp, Homo sapiens
ttccctctgtgttagagcagagaggtttcgatatttattgatgttttcacaaagaacagg

SEQ ID NO: 122 - DNA, 60 bp, Homo sapiens
ctgcagcgtttctctttcccttggaaaagagaatttatcattactgttacatttgtacaa

SEQ ID NO: 123 - DNA, 60 bp, Homo sapiens
gttcatagtctttattttgtcctttgaataaacattaaaagatttctaaacttcaaaaaa

SEQ ID NO: 124 - DNA, 60 bp, Homo sapiens
aatcaagatttgtataaaatgttgtttacagatcttttaatgaataaatacataaacccc

SEQ ID NO: 125 - DNA, 60 bp, Homo sapiens
cattttgttacataaggatgacttttttatacaatggaataaattatggcatttctattg

SEQ ID NO: 126 - DNA, 60 bp, Homo sapiens
cgggttgggtgggaggaggaagaaagggaagaattaggtttgaattgcttttttaaaaaa

SEQ ID NO: 127 - DNA, 60 bp, Homo sapiens
ccgtgtgaatgtgaagaaaagcagtatgttactggttgttgttgttgttcttgtttttta

SEQ ID NO: 128 - DNA, 60 bp, Homo sapiens
gaagggagagttaaattctccattatgttcgtggtgtaaagtttagagctggaatttatt

SEQ ID NO: 129 - DNA, 60 bp, Homo sapiens
tgtaaagatgttttgtataaactctgaattattttcttgttgcttttttcttagaaaaaa

SEQ ID NO: 130 - DNA, 60 bp, Homo sapiens
ggatatgtggtgtatatccttccaaaaaattaaaacgaaaataaagtagctgcgattggg

SEQ ID NO: 131 - DNA, 60 bp, Homo sapiens
cacctgtgggaagagaagtgaagactttctccttgcattaaaaagtctgaactgtgaaaa

SEQ ID NO: 132 - DNA, 60 bp, Homo sapiens
tgtccaagtaatgtttttataataaactaagccatatttagacaataaacatcgaaaaaa

SEQ ID NO: 133 - DNA, 60 bp, Homo sapiens
gaaaatagataatttacaagatattattaatttttatttatttttcttgggaattgaaaa

SEQ ID NO: 134 - DNA, 60 bp, Homo sapiens
tgaatttgaatgaaaaatttaagcattgtttgcttattgttccaagacattgtcaataaa

SEQ ID NO: 135 - DNA, 60 bp, Homo sapiens
taaaggaaaagttgattatgtatgtggggtgccaggaccactgccttgaaagcaagtgtg

SEQ ID NO: 136 - DNA, 60 bp, Homo sapiens
gaattatctaaatgcgtctaccattttgcactagggaggaaggataaatgctttttatgt

SEQ ID NO: 137 - DNA, 60 bp, Homo sapiens
gactcgggggctggtctgatggaactgtgtatttatttaaaactctggtgataaaaataa

SEQ ID NO: 138 - DNA, 60 bp, Homo sapiens
ccccaaaagagttgatgtgtgttttaaaagaaaaaacccaatgaggaacaattggagatt

SEQ ID NO: 139 - DNA, 60 bp, Homo sapiens
gtgccatttctgaactgttacaacttgtatttccaaacctggttcatatttatactttgc

SEQ ID NO: 140 - DNA, 60 bp, Homo sapiens
cgactgtcgagatcgcctagtatgttctgtgaacacaaataaaattgatttactgtctgc

SEQ ID NO: 141 - DNA, 60 bp, Homo sapiens
gattccagaatttttctgtgatacatgaagactttccatatcaagagacatggtattgac

SEQ ID NO: 142 - DNA, 60 bp, Homo sapiens
ccatgagaccactgttatcaaaactttcttttctggaatgtaatcaatgtttcttctagg

SEQ ID NO: 143 - DNA, 60 bp, Homo sapiens
gcctagtttttaatagctatggaatcaattcaatttggactggtgtgctctctttaaatc

SEQ ID NO: 144 - DNA, 60 bp, Homo sapiens
atggaaatataaaagtaaatatgaaacatttaaaatataatttgttgtcaaagtaaaaaa

SEQ ID NO: 145 - DNA, 60 bp, Homo sapiens
tctgatctggacttcctataatacaaatacacaatcctccaagaatttgacttggaaaag

SEQ ID NO: 146 - DNA, 60 bp, Homo sapiens
ctccttttggtgtaatgttttacaaatcctttggcctgagaactaatatgttaattgcct

SEQ ID NO: 147 - DNA, 60 bp, Homo sapiens
agaatccagagttgctacaataaaataaggggaataataaacttgagagtgaataaccat

SEQ ID NO: 148 - DNA, 60 bp, Homo sapiens
ggaggaagaagtgtaactcaccagcctctgctcttatctttgtaataaatgttaaagcca

SEQ ID NO: 149 - DNA, 60 bp, Homo sapiens
ctgtatagttgtagaattttttgagagaatgagatgtttatatattaacgacaatttttt

SEQ ID NO: 150 - DNA, 60 bp, Homo sapiens
gaatgttttgtgtgaaaggagtataccatgagatgagatgaccaccaatcatttccttgg

SEQ ID NO: 151 - DNA, 60 bp, Homo sapiens
catatatgttaaaggattataatttatggaattaaaaaatgcagtgtagtccttaaaaaa

SEQ ID NO: 152 - DNA, 60 bp, Homo sapiens
gaatgatgtccccgttgtatgtatgagtggcttctgggagatgggtgtcactttttaaac

SEQ ID NO: 153 - DNA, 60 bp, Homo sapiens
aatacattgtctagcattgatttggttcctgtgcatatgtattttcactatgtgctcccc

SEQ ID NO: 154 - DNA, 60 bp, Homo sapiens
tcctttccactgaaaagcacatggccttgggtgacaaattcctctttgatgaatgtaccc

SEQ ID NO: 155 - DNA, 60 bp, Homo sapiens
gctgtctaggatgatcactgattactatttactaagtagccacatgcaaataaaagttgt

SEQ ID NO: 156 - DNA, 60 bp, Homo sapiens
ccaagtgagcacattcagctttggaaactatattatttaatgtaggctagcttgttttca

SEQ ID NO: 157 - DNA, 60 bp, Homo sapiens
aatagtgtttgtggggagccagagattcctaaaagaacagtgaatagcacagtctcatta

SEQ ID NO: 158 - DNA, 60 bp, Homo sapiens
cacggggtaggggaaatggggtgaacggtgctggcagttcggctagatttctgtcttgtt

SEQ ID NO: 159 - DNA, 60 bp, Homo sapiens
gtaactgttttcaaggaggtgcttaggattgtgggtttctgattgcatcactagcttctc

SEQ ID NO: 160 - DNA, 60 bp, Homo sapiens
cagtgctagagtgagcatgcttcaaaactgtacatgaagccaatatatttttggataagt

SEQ ID NO: 161 - DNA, 60 bp, Homo sapiens
gagtacggatgggaaactattgtgcacaagtctttccagaggagtttcttaatgagatat

SEQ ID NO: 162 - DNA, 60 bp, Homo sapiens
cattgtttgacccagtatgtcttgtagacacgttagttataatcaccttgtatctctaaa

SEQ ID NO: 163 - DNA, 60 bp, Homo sapiens
aaccacgggtgctttgttcttccttctgcacctccttcttaaactagatagctaattagt

SEQ ID NO: 164 - DNA, 60 bp, Homo sapiens
gtattgtgaagtggtataagaaatgactttgaaccactttgcaattgtagattcccaaca

SEQ ID NO: 165 - DNA, 60 bp, Homo sapiens
ccaataagtggagattcctccttatgatgtatgctaggttatggaagatgtaaaatattc

SEQ ID NO: 166 - DNA, 60 bp, Homo sapiens
gttgtattgtaccagtgaaatgccaaatttgaaaggcctgtactgcaattttatatgtca

SEQ ID NO: 167 - DNA, 60 bp, Homo sapiens
gttggtgacttaacaaattaagagcatagttgccatatgctcatatttggcaaatatgtc

SEQ ID NO: 168 - DNA, 60 bp, Homo sapiens
cctgcggggctggtgtgaaaggcgctgggaaccggctttgaatgaataaatgaatcgtgt

SEQ ID NO: 169 - DNA, 60 bp, Homo sapiens
ggctggagctgcctctctcatccactttccaataaagagttccttctgctccaaaaaaaa

SEQ ID NO: 170 - DNA, 60 bp, Homo sapiens
ggttgagaccagcactctgtgaaaccttgaaatgagaagtaaaggcagatgaaaagaaaa

SEQ ID NO: 171 - DNA, 60 bp, Homo sapiens
aggtagcctgctggttttatctgagtgaaatactgtacaggggaataaaagagatcttat

SEQ ID NO: 172 - DNA, 60 bp, Homo sapiens
ggagttcaagatcagcctgggcaacacagtgagacctcatctccactaaaaataaaaaaa

SEQ ID NO: 173 - DNA, 60 bp, Homo sapiens
ccaaagtgatgcagtggttaccatgacaccctaatttcatgtgtttttgtatttatgaaa

SEQ ID NO: 174 - DNA, 60 bp, Homo sapiens
cctcagtgggaggcgtggctgagaccaactggtttgcctataatttattaactatttatt

SEQ ID NO: 175 - DNA, 60 bp, Homo sapiens
atgtactttatattttctatatttgtaactttgcatgttcttgttttgttatataaaaaa

SEQ ID NO: 176 - DNA, 60 bp, Homo sapiens
gcgaatgtttcagtgcctcagacaaatgtgtatttaacttatgtaaaagataagtctgga

SEQ ID NO: 177 - DNA, 60 bp, Homo sapiens
ataacagtattttaaatttgtaaagaatgtctaataaaatataatctaattacatcatga

SEQ ID NO: 178 - DNA, 60 bp, Homo sapiens
gatgcaaggataaacctttactttgactaccagcctgtgtttttgtctttaaatctctta

SEQ ID NO: 179 - DNA, 60 bp, Homo sapiens
aatttaagactatttttgtaaagctctactgtaaataaaatattttataaaactaaaaaa

SEQ ID NO: 180 - DNA, 60 bp, Homo sapiens
gtggcacgtaagctccttgtctgtctccagcacccagaatctcattaaagcttatttatt

SEQ ID NO: 181 - DNA, 60 bp, Homo sapiens
cctggaatcagtgttactgcatctgattaaatgtctccagaaataaagaataattctgcc

SEQ ID NO: 182 - DNA, 60 bp, Homo sapiens
tgatctacaatgaagccctcaagggctgaaaataaatagggaagatggagacaccctctg

SEQ ID NO: 183 - DNA, 60 bp, Homo sapiens
caagccagaggctgggttcatttgtgtaacgacaataaacggtacttgtcatttcgggca

SEQ ID NO: 184 - DNA, 60 bp, Homo sapiens
gttggagtgagcacctcctctgtaggcacctctcacactgttgtctgttactgatttttt

SEQ ID NO: 185 - DNA, 60 bp, Homo sapiens
gatcatctgaggtcagaagttcgagaccagcctggccaacatggtgaaaccctgcctcca

SEQ ID NO: 186 - DNA, 60 bp, Homo sapiens
ccttagaagaaagagactgtagcaatacaaaaatcaagcttagtgctttattacctgagt

SEQ ID NO: 187 - DNA, 60 bp, Homo sapiens
tatgtctgtatcttatattcaattgcaagtatataataaataaacctgcttccaaacaac

SEQ ID NO: 188 - DNA, 60 bp, Homo sapiens
tctgagattcaatattgaatttctcctatgctattgacaataaaatattattgaactacc

SEQ ID NO: 189 - DNA, 60 bp, Homo sapiens
ctttggctttgctaccagttccatatgatgagaaataaacgttcgctgaggttttgtttc

SEQ ID NO: 190 - DNA, 60 bp, Homo sapiens
gagggaaagcatgtctgctgggtgtgaccatgtttcctctcaataaagttcccctgtgac

SEQ ID NO: 191 - DNA, 60 bp, Homo sapiens
cctcttgagtgtcttggggacagctctttccacccctggaagatggaaataaacctgcgt

SEQ ID NO: 192 - DNA, 60 bp, Homo sapiens
attaacttgagttttatttatcttatcctctggtttaattacataaatatttatttttta

SEQ ID NO: 193 - DNA, 60 bp, Homo sapiens
aggttggcagtaaggcagggtcccatttctcactgagaagattgtgaatatttccatatg

SEQ ID NO: 194 - DNA, 60 bp, Homo sapiens
ccactctgctgcctgtacagaagaaactgaatctttttcatattctaataaatcaatgtg

SEQ ID NO: 195 - DNA, 60 bp, Homo sapiens
aatagtatttattttagaaagtctactattgtaagagttcttctgtttgtgaagaaaaaa

SEQ ID NO: 196 - DNA, 60 bp, Homo sapiens
gggtcgtattcctgatttcagaagaggatcataactgaaacaacataagacaatataatc

SEQ ID NO: 197 - DNA, 60 bp, Homo sapiens
cagtaatgtgcattgttattgagttgtactgtaccttatttggaaggatgaaggaatgaa

SEQ ID NO: 198 - DNA, 60 bp, Homo sapiens
aatgcacagtgtttccctgtttatccatcccctgcaaactgcagagtggcactcattgct

SEQ ID NO: 199 - DNA, 60 bp, Homo sapiens
gacatgcctgtagttacatccagtgtgatgggtgctgagaggcaagtacaaaccacgatg

SEQ ID NO: 200 - DNA, 60 bp, Homo sapiens
ctgaccaacatcgtgaaatgccgtctttacaaaaaaatacaaaaattaactggaaaaaaa

SEQ ID NO: 201 - DNA, 60 bp, Homo sapiens
ctgtcaaaggtccctatttgaaatgtgttataatacaaacaaggaagcacattgtgtaca

SEQ ID NO: 202 - DNA, 60 bp, Homo sapiens
tggggagagtttggaggggagggagaatttattaataaaagaatctttaactttaaaaaa

SEQ ID NO: 203 - DNA, 60 bp, Homo sapiens
gggggctggcagaggcccccatatactctgctacagctcctatcatgaaaaataaaatgt

SEQ ID NO: 204 - DNA, 60 bp, Homo sapiens
tttaaaagctattttagtaatttaaataaatttactttcttggtttatactctcaaaaaa

SEQ ID NO: 205 - DNA, 60 bp, Homo sapiens
catatgtttctgtgcatgttctctacacaattgtaaggtgtcactgtatttaactgttgc

SEQ ID NO: 206 - DNA, 60 bp, Homo sapiens
agcctattcactatgtttattgcaaaatcctttcgaaataaacagtttccttgcacggtt

SEQ ID NO: 207 - DNA, 60 bp, Homo sapiens
gcttttttaagaaaataattgggcagtgaaataaatgtatcttcttgtctctggaaaaaa

SEQ ID NO: 208 - DNA, 60 bp, Homo sapiens
gatttcatgtcactaaacaagaaatctgacaatagtgccaggaaactaatttcctgatac

SEQ ID NO: 209 - DNA, 60 bp, Homo sapiens
aggcgaggcagcttgagttaaacgaacgtacttgcagatgtgacaagccgaggcggtgag

SEQ ID NO: 210 - DNA, 60 bp, Homo sapiens
ttattaccttaaaagtctatttttgtgttttgggcatttttaaataaacaatctgagtgt

SEQ ID NO: 211 - DNA, 5851 bp, Homo sapiens
cttgcgcggtgtggcggccgatgccgctataaaggcttgttttgctgcagggctcatgctcgggagcgtggttgagcggctggcgcggttgtcctggagcaggggcgcaggaattctgatgtgaaactaacagtctgtgagccctggaacctccactcagagaagatgaaggatatcgacataggaaaagagtatatcatccccagtcctgggtatagaagtgtgagggagagaaccagcacttctgggacgcacagagaccgtgaagattccaagttcaggagaactcgaccgttggaatgccaagatgccttggaaacagcagcccgagccgagggcctctctcttgatgcctccatgcattctcagctcagaatcctggatgaggagcatcccaagggaaagtaccatcatggcttgagtgctctgaagcccatccggactacttccaaacaccagcacccagtggacaatgctgggcttttttcctgtatgactttttcgtggctttcttctctggcccgtgtggcccacaagaagggggagctctcaatggaagacgtgtggtctctgtccaagcacgagtcttctgacgtgaactgcagaagactagagagactgtggcaagaagagctgaatgaagttgggccagacgctgcttccctgcgaagggttgtgtggatcttctgccgcaccaggctcatcctgtccatcgtgtgcctgatgatcacgcagctggctggcttcagtggaccagccttcatggtgaaacacctcttggagtatacccaggcaacagagtctaacctgcagtacagcttgttgttagtgctgggcctcctcctgacggaaatcgtgcggtcttggtcgcttgcactgacttgggcattgaattaccgaaccggtgtccgcttgcggggggccatcctaaccatggcatttaagaagatccttaagttaaagaacattaaagagaaatccctgggtgagctcatcaacatttgctccaacgatgggcagagaatgtttgaggcagcagccgttggcagcctgctggctggaggacccgttgttgccatcttaggcatgatttataatgtaattattctgggaccaacaggcttcctgggatcagctgtttttatcctcttttacccagcaatgatgtttgcatcacggctcacagcatatttcaggagaaaatgcgtggccgccacggatgaacgtgtccagaagatgaatgaagttcttacttacattaaatttatcaaaatgtatgcctgggtcaaagcattttctcagagtgttcaaaaaatccgcgaggaggagcgtcggatattggaaaaagctgggtacttccagagcatcactgtgggtgtggctcccattgtggtggtgattgccagcgtggtgaccttctctgttcatatgaccctgggcttcgatctgacagcagcacaggctttcacagtggtgacagtcttcaattccatgacttttgctttgaaagtaacaccgttttcagtaaagtccctctcagaagcctcagtggctgttgacagatttaagagtttgtttctaatggaagaggttcacatgataaagaacaaaccagccagtcctcacatcaagatagagatgaaaaatgccaccttggcatgggactcctcccactccagtatccagaactcgcccaagctgacccccaaaatgaaaaaagacaagagggcttccaggggcaagaaagagaaggtgaggcagctgcagcgcactgagcatcaggcggtgctggcagagcagaaaggccacctcctcctggacagtgacgagcggcccagtcccgaagaggaagaaggcaagcacatccacctgggccacctgcgcttacagaggacactgcacagcatcgatctggagatccaagagggtaaactggttggaatctgtggcagtgtgggaagtggaaaaacctctctcatttcagccattttaggccagatgacgcttctagagggcagcattgcaatcagtggaaccttcgcttatgtggcccagcaggcctggatcctcaatgctactctgagagacaacatcctgtttgggaaggaatatgatgaagaaagatacaactctgtgctgaacagctgctgcctgaggcctgacctggccattcttcccagcagcgacctgacggagattggagagcgaggagccaacctgagcggtgggcagcgccagaggatcagccttgcccgggccttgtatagtgacaggagcatctacatcctggacgaccccctcagtgccttagatgcccatgtgggcaaccacatcttcaatagtgctatccggaaacatctcaagtccaagacagttctgtttgttacccaccagttacagtacctggttgactgtgatgaagtgatcttcatgaaagagggctgtattacggaaagaggcacccatgaggaactgatgaatttaaatggtgactatgctaccatttttaataacctgttgctgggagagacaccgccagttgagatcaattcaaaaaaggaaaccagtggttcacagaagaagtcacaagacaagggtcctaaaacaggatcagtaaagaaggaaaaagcagtaaagccagaggaagggcagcttgtgcagctggaagagaaagggcagggttcagtgccctggtcagtatatggtgtctacatccaggctgctgggggccccttggcattcctggttattatggcccttttcatgctgaatgtaggcagcaccgccttcagcacctggtggttgagttactggatcaagcaaggaagcgggaacaccactgtgactcgagggaacgagacctcggtgagtgacagcatgaaggacaatcctcatatgcagtactatgccagcatctacgccctctccatggcagtcatgctgatcctgaaagccattcgaggagttgtctttgtcaagggcacgctgcgagcttcctcccggctgcatgacgagcttttccgaaggatccttcgaagccctatgaagttttttgacacgacccccacagggaggattctcaacaggttttccaaagacatggatgaagttgacgtgcggctgccgttccaggccgagatgttcatccagaacgttatcctggtgttcttctgtgtgggaatgatcgcaggagtcttcccgtggttccttgtggcagtggggccccttgtcatcctcttttcagtcctgcacattgtctccagggtcctgattcgggagctgaagcgtctggacaatatcacgcagtcacctttcctctcccacatcacgtccagcatacagggccttgccaccatccacgcctacaataaagggcaggagtttctgcacagataccaggagctgctggatgacaaccaagctcctttttttttgtttacgtgtgcgatgcggtggctggctgtgcggctggacctcatcagcatcgccctcatcaccaccacggggctgatgatcgttcttatgcacgggcagattcccccagcctatgcgggtctcgccatctcttatgctgtccagttaacggggctgttccagtttacggtcagactggcatctgagacagaagctcgattcacctcggtggagaggatcaatcactacattaagactctgtccttggaagcacctgccagaattaagaacaaggctccctcccctgactggccccaggagggagaggtgacctttgagaacgcagagatgaggtaccgagaaaacctccctctcgtcctaaagaaagtatccttcacgatcaaacctaaagagaagattggcattgtggggcggacaggatcagggaagtcctcgctggggatggccctcttccgtctggtggagttatctggaggctgcatcaagattgatggagtgagaatcagtgatattggccttgccgacctccgaagcaaactctctatcattcctcaagagccggtgctgttcagtggcactgtcagatcaaatttggaccccttcaaccagtacactgaagaccagatttgggatgccctggagaggacacacatgaaagaatgtattgctcagctacctctgaaacttgaatctgaagtgatggagaatggggataacttctcagtgggggaacggcagctcttgtgcatagctagagccctgctccgccactgtaagattctgattttagatgaagccacagctgccatggacacagagacagacttattgattcaagagaccatccgagaagcatttgcagactgtaccatgctgaccattgcccatcgcctgcacacggttctaggctccgataggattatggtgctggcccagggacaggtggtggagtttgacaccccatcggtccttctgtccaacgacagttcccgattctatgccatgtttgctgctgcagagaacaaggtcgctgtcaagggctgactcctccctgttgacgaagtctcttttctttagagcattgccattccctgcctggggcgggcccctcatcgcgtcctcctaccgaaaccttgcctttctcgattttatctttcgcacagcagttccggattggcttgtgtgtttcacttttagggagagtcatattttgattattgtatttattccatattcatgtaaacaaaatttagtttttgttcttaattgcactctaaaaggttcagggaaccgttattataattgtatcagaggcctataatgaagctttatacgtgtagctatatctatatataattctgtacatagcctatatttacagtgaaaatgtaagctgtttattttatattaaaataagcactgtgctaataacagtgcatattcctttctatcatttttgtacagtttgctgtactagagatctggttttgctattagactgtaggaagagtagcatttcattcttctctagctggtggtttcacggtgccaggttttctgggtgtccaaaggaagacgtgtggcaatagtgggccctccgacagccccctctgccgcctccccacggccgctccaggggtggctggagacgggtgggcggctggagaccatgcagagcgccgtgagttctcagggctcctgccttctgtcctggtgtcacttactgtttctgtcaggagagcagcggggcgaagcccaggccccttttcactccctccatcaagaatggggatcacagagacattcctccgagccggggagtttctttcctgccttcttctttttgctgttgtttctaaacaagaatcagtctatccacagagagtcccactgcctcaggttcctatggctggccactgcacagagctctccagctccaagacctgttggttccaagccctggagccaactgctgctttttgaggtggcactttttcatttgcctattcccacacctccacagttcagtggcagggctcaggatttcgtgggtctgttttcctttctcaccgcagtcgtcgcacagtctctctctctctctcccctcaaagtctgcaactttaagcagctcttgctaatcagtgtctcacactggcgtagaagtttttgtactgtaaagagacctacctcaggttgctggttgctgtgtggtttggtgtgttcccgcaaaccccctttgtgctgtggggctggtagctcaggtgggcgtggtcactgctgtcatcaattgaatggtcagcgttgcatgtcgtgaccaactagacattctgtcgccttagcatgtttgctgaacaccttgtggaagcaaaaatctgaaaatgtgaataaaattattttggattttgtaaaaaaaaaa

SEQ ID NO: 212 - DNA, 3832 bp, Homo sapiens
cacctctaacccaggctcagagtagctgctgtttctgagagaacgattcgtaggacagcccctgacgccattcccttttgcccttctttctgcgggcctttccggtacttgagcggtgtccagagcgtggccagttctcgtctatctggctgcctttagggagcggtgcctagcgttggccaatagttggctgtcgaaagtgccggcccccgcgccggcgcctgcagcagccgggtgggaaggctcaagatggcgtgcttgttggagaccccaatccgcatgagcgtcctttcggaccaggaatgaaagttactgggagataacttcgaaggattttgcaacaaattcgagctgtccgactctgagaatggaagtaacagctagcagtcgccactatgttgacaggctatttgaccctgatccccagaaagttctacaaggtgtcatagacatgaaaaatgctgtaattggaaacaacaagcagaaagccaatctcattgttttaggagctgttccaagattgttgtacttgcttcagcaagaaacctcaagcacagagctgaaaactgaatgtgcagtggtgttgggaagtcttgctatgggtactgaaaacaatgtcaagtctctactggactgccatattatccctgccttattgcaaggactactgtccccagacctgaagtttattgaagcttgcctccgatgcctgcgtaccatcttcaccagtcctgtcactccagaggagctactgtatacagatgccacagtgataccacacctcatggcactgcttagcaggtcccgctatacccaggagtacatctgtcagatcttctcacactgctgtaaagggccagatcatcaaacaattttatttaaccacggtgcagttcagaatattgctcacctactaacctcactgtcctacaaagttcgaatgcaagcactgaaatgtttctcagttttagcttttgaaaacccccaggtatcgatgaccctggtaaatgttttggttgatggagaattgttaccacagatttttgtgaagatgttacagagggataagcctattgagatgcagctcacatcagcaaaatgtttaacttacatgtgtagagctggagcaattcggacagatgataactgtattgtattaaagacattaccttgtttggttcgaatgtgcagtaaggagagattactagaggagagagttgaaggagctgagacacttgcctatctgattgaaccagatgttgagctacagagaatcgctagcataactgatcacctcattgccatgcttgctgattatttcaagtatcccagctcagtgagtgccatcactgatattaaaaggcttgatcatgatttaaaacatgctcacgaactccgccaggctgcattcaagctctatgcctctcttggagcaaatgatgaagacatccggaagaagatcattgagactgaaaatatgatggaccgaattgtgactggcttgtctgagtctagtgtcaaggtgcggttagctgccgtcagatgtttgcacagtttatccagatctgtgcagcagcttcgaaccagtttccaggatcatgctgtttggaaacctttaatgaaggttttacaaaatgcaccagatgaaatcctagtggtagcatcttccatgctgtgtaatcttcttcttgaattttctccaagcaaagagccaattttggaatcaggagccgtagagctactttgtggattaactcagagtgaaaatcctgctttacgagtgaatggaatttgggctttaatgaatatggcatttcaggctgaacaaaaaataaaagcagatattttacgaagcttgagtactgaacagctattccggttattatcagattcagatttgaatgtgctgatgaagacattgggacttcttagaaatctcctctccactcgtcctcatatagataaaataatgagtactcatggaaagcaaattatgcaagccgtcactcttattctagaaggggaacataacattgaggtcaaagagcagacactgtgcatcttagccaacatagcggatgggacaacagcaaaagatcttattatgaccaatgatgatatcctacagaaaatcaagtattacatgggccattcacatgttaaactgcagcttgcagccatgttttgtatatcaaacctcatatggaatgaagaggaaggttcacaagaacgccaggataaattacgagacatgggcatcgtagatattctacacaaactgagtcagtcaccagattcaaacctttgtgacaaggcaaagatggcactgcagcagtacctggcatgatgggagtgcccctgggcacctgcgagcatcccacctccttgtttaaggaagtacaggaaccagcctcatttgattccttctatttgcacaagtcaccttggactgcagggagctgttttgcaaaagcagtttagtaggcttagatctcaaattcatcttgagaacatttttttgaggtagtaatttcctcagaagactcttgtgttttgttttggtttttttttctgagctactcggactctttattagaacaatcaatcattttcctttggacctacaatttttgcctatgctgcagccactttgtgagtgagaatgaatatgtctgtgtgaacacacaggcatgcgtgtgtatgtgcacgtacatgggccagaatgaatggatgtgtgtgtgtgagggatacctcagatttttcttttcttattttgtgtgaaaatctcttttctacagattttccagggtttaagcattgcttgctgtataaaaaactttactgaattatatacagtttgaatgaaatgttattttaaaaacaaaacaattgttaagtgttccataaaggttatgttgaattttggtcagatgaatatttgtaagtaaaaaatatatgcatttctgaacctcaacttacatagattttctttatataaaaaaaaagaaaaaaaaagaaaaagttggctatagttggcctgattaacaggcactatacatggtgctgtgcaaaatagtaagctagcatcttactgccgtcaatattagcaggtacagagccttttttcatcctaattcagtaagttctcaggcttccaagtcaaatggagaagtaaagtgaggcaacagattcaccataggctttttgaagcatcaaagggaaatataactactgatagtgaaagcccagccatgacccagatgggcttacccttgacaggaactggggaccaagagcctcccaattgccctaactcctgtcattggtattagcaatatctggccagatttagaaccagtcatggaaacttgtgctcaaactaaaagtaggtcatcacttcccagaaacagaataccttgtgcttcctgaaacagcatatatcactgtgaaactaaagaatattctacagacacccctgtagaaagaaacaaagaacaggatagtttagaaagctttctgttagctgtattcagcaaatttcatactagttgctcaggactgctagttggtatgcttttgtaaaacgagattgaaatttaataaaagatgcaactaaaatctttcctgcatgaagctaaaagcactcaagttgagagaggggcaagggaatctccccaggatgactgaagatgacttctttttacagcaagtactgttagcctttctgcaccccttagcttggcccctgctccaacttctgggtcagcagcaaggtgaactcaacagaagttgctcttgactgtttgaaggtagaagcagcctaccttttctc

SEQ ID NO: 213 - DNA, 4140 bp, Homo sapiens
ggtgccggagcgcgggcgcggcgcactcggagcgggatggagcgggcgcgcgggccgcgggccgaggccgacgcgcctgaggaggaggaggaggcgggggcggccatggctgctgtggtggtggcggctgcgggtggcgcgggaccggcggtcctgcaggtggccggtctctaccggggcctgtgcgcggtgcgcagccgcgccctgggcctggggctcgtgtcacccgcgcagctgcgcgtcttcccagtgcgccccggctcgggccggcccgaggggggcgccgacagcagcggggtcggggccgaggccgagctccaggccaaccctttctacgaccgctaccgcgacaagatccagctgctgcgcaggtcagacccagctgcttttgagtcccgcctggagaaacgcagtgaatttcggaagcagccagtggggcattccaggcaaggtgattttatcaaatgtgtggaacagaagacagatgccttggggaaacagtctgtgaacagaggattcactaaggacaagactctcagttcaatctttaacattgagatggtaaaagaaaaaactgcagaagaaataaaacagatttggcagcaatattttgcagcaaaagatacagtctacgcagttattcctgcagaaaagtttgatttgatctggaaccgggctcagtcctgtccaacatttctatgtgctctgccaagaagggaaggttatgagttttttgtaggacaatggacaggtactgaactccacttcactgcacttataaatattcagacccgaggggaagctgcagccagccagctgattttatatcactatcctgaacttaaggaagaaaagggcatagtgctgatgactgcagaaatggattccacatttctgaatgttgctgaggcacagtgcatcgccaaccaagttcagctcttctacgctactgatcggaaagagacctacgggttagtggagacctttaacctcagaccaaatgagttcaaatatatgtctgtcatcgctgaattggagcaaagcggacttggagcagaactgaaatgtgcccagaaccaaaataagacttagaactgtacaggttggcccttcacctagttgactcagccctcgatagtctagagcccaccccctcctcaggaactcaagagctcagcatttataatgagcagttggtaatgagttgccctatgtgcttgtcgcaagcagtcacagagatgagccctattacttgatattcaggaacaaaggtacctgaacattctgataattatctcagcatacttgaggtttccttttttaagtgttcgaggttataacaagagacagccaaggacctacaagacagttgacttgattttgcacagtgtaacagcgcagttgcattctggccactttgaccttatagctcccaaatgatgagtttgtcatctttatgaactcatgacaggataataagcttgaagacctgctgtagttagatatgggctttaatccttcccaggcaccagtcagctgaacaaaagcataagccaaacatcctgtttaaactgtagaataaccagatattcccatcaggttaaagacttcatctagatgatgccccccagagatgcctttagtgtaagtagctggcttggggtatcagcaaatttcaggtatagttagataaacaggtacagggcctgcatactattaaaccatagtttgtggcacccgcttttctaactccacctgttagaagctatgtgtttgaaggaatgaatcagtgcagtataaataaaattcttttgtaaggagaagattaatcctggtttgcatgatttttttaaaaacaactctaaacatgatacgaaaaagtggatgaaagcaaatgttcccagattggatgtggggaaaatatagcaataattttttttttaagtctggcttacaatgtttgttatacaaaataatgaaatctgagttatgtactgtccattgtgtcagggctatgggctgattttatcaaaactcatcttgggactgaaaaattgtttggaatgccagaaataagaaagttgttctccagagctggaaacccatctttcgtttgtagtgtcactgttgtggctccaagctcagtgataggaaaggacggtggttacacaccagccttctgaacccaaggcccccagtattgttgtcagctgcctttaccatggcatttctttctctttctttttttcctgagatgaagtcttgctctgtcttgcccaggctggagtacagtagcgtgatctcagctcgctgcaacctctacctccctggttcaagtgattctgctgcgtcagcctcctgaggagctaggattacaggcgcatgccaccatacctggcttatttttgtattgttgtagagacagggtttcactttgttggccaggctggctggtctcgaactcctggcctcaagtgatccaccaccttggcctcccaaagtgctgggattacaggtgtgagccaccgtgcctggcctgacatttctttattgatctaacatgctccactctgctgctcctgcctaagatctggttatatgacactgaatgtggtgagtgggaatttaagcagtattcgcagtttgtgtgtgtgtgttttcttccttccagaagaatttttataggttgggcctgtccctaagctctttaaatagggtggacatcccactattctctgagccgtgtctattttgttgcacctttgagtctatgtattgagagagacagatagtatttttttaaactggggaagctgctatcctttcactatttctctaaaggttgagctgttaactaatgtaaattctggacctgcttctggtcctggcagtttatcttttgagaaacttgagtcttatctgccctgccattttcattaaatgccttctgaccttctgaatgttttgggtcccaagaatttttgacatcagatggggttgtttttattggtatccagttatgtttgcttgtctttccagatgggcccagttattagccatacatagtacattgatacacctccaccagcgggtgaggaaatgatggaaaaaggagtaagaagtggccattcgttttaatcattcctcctggatttgtcctcagtccccaactgccaagtaggatgtgtccatggataaatgtgtggggcatgactaaagtaccacgtagctgttctttatatttatttacctagaaagatctggcaaagaactcaaagaaaattgtaccatttaatcagtaaatttgtcccctggtgctagcatggtgttatagaaagtggacaggctttagagttaagtgaatctgggttcatatgttagtgttgctattcattagctctatactgttgaacaaattgcttaaactatctaattttggggttttttttccatctaaaatagggataataatatctacctcataggattattgtgagaattaaattaacttcactatagtagaaaatatcaactaccatccttttctctacttcccttgcccctcattaaagactaatacaagttagcatttcagatgtgtagatcattctttattccagttaaaagaacaaactttatctcatcagttctgaaactttaagatgcagtagcatcacctaaagtgcttttaaaatgcagattctcaggcctcaaccgtacaccacccccccacacacgtactaaatcaagaatatgtgcagaaggtactgggaatctacttgttaatatgtgctccaaatgattctgatgtaggtaattagccagccacactttgagaaccactgccttatctattctttacaaaaatgtacattgccaggtctttctttcctgtggatgctaactataggatatttaggttcctctgttctttgtctcccatagtggccccctttgcaaactccaaatacattatatttatttattcttgtgtcttttttcccccactagactgtgagctccttgagggccaggacttatctctgttcgcagtgccaaggacatggcctggaccatagaagatactcagttttttgttgaataaataggtaatatggatttcaaccaaaaaaaaaaaaa

SEQ ID NO: 214 - DNA, 5972 bp, Homo sapiens
ctgtgtgttcagccattactttgctcggcgctgctcccaggcatctccgaccctcggtgctgtggggagccccacacttgggctcctcgcctctcgccctcgctccccgtccctcctcccctctctccgccccttcccccttttctttctcctctctttcttcccctctctcccttctttcggccgccgtctcccccgcgccctcctcggggcggagggaagccgtgaagggggagggagggctcggtgtcaatttttttttgtgtggctgcggccgtagcctgtggcgggcaagcggggagaccccggcgcagcagaaccatggatggcccgacgcggggccatggactccgcaaaaagcggcggtcgcggtcgcagcgagaccgggagaggcgctcccggggcgggctgggggccggcgcggccggcggcggcggggctggccggacccgggcgctctcactcgcctcgtcgtcgggctccgacaaggaagacaatgggaagcccccgtcctccgccccgtcccggcccagacccccgcggaggaagcggagagagtccacctcggcagaagaggacatcattgatggatttgccatgaccagctttgtcacttttgaagcgctggagaaagatgtagcacttaagcctcaggaacgtgtggagaaacgccagacgcccctgaccaagaagaaacgagaagcacttaccaatggcttgtcctttcattcaaagaagagcagactcagccacccacaccactacagctcagatcgagaaaatgaccgcaatctctgccagcaccttgggaagagaaagaaaatgccgaaggcactcagacagctcaagccaggacagaacagctgcagggacagtgacagtgaaagtgccagtggagaatccaagggcttccaccggagcagctctcgggaaaggctcagtgatagttcagctccttccagcttgggaacaggctacttctgtgacagtgacagtgaccaggaagagaaggcatcagatgccagctctgaaaaactcttcaacactgttattgtaaacaaagatccggagttaggtgttggcacgctaccagaacatgacagccaggatgcagggccgattgtccccaagatatcgggtctagagagaagccaggagaagagccaggactgttgcaaagagccaatctttgagcctgtggtgcttaaagacccctgccctcaggtcgcacagccaataccccagccgcagacggagccccaactccgagctccttctccggaccctgacttggtgcagcgcacagaggccccacctcaacccccacctctgagtacacagccaccacagggccctcctgaggcccagctccagcctgccccgcagcctcaggtgcagaggccacccaggccacagtcccccacccagctgctccatcagaacctcccacctgtgcaggcccacccctctgctcagagcctctcccagccattgtcagcctacaacagcagtagcttaagcctcaacagtttaagcagcagcagaagcagcactccagcgaagactcagcccgccccacctcacatctcccaccacccctctgcctccccgttccccctctccctgcccaaccacagccccctgcacagcttcacacccaccctccagccccccgcacactcacatcaccccaatatgtttgcccctcccactgctctgcctcctccaccaccactgacatcaggaagtctgcaggtggccggacacccggccgggagcacttactcagagcaagacatcttgcgacaggaactgaacactcgttttttggcctctcagagtgctgaccgcggggcttccctgggccctccgccctacctgcggaccgagttccatcagcaccagcaccagcaccagcacacccaccagcacacgcaccagcacaccttcacgccgttcccccacgccatcccacccaccgccatcatgccgacgccagcacctcccatgtttgacaaataccctacaaaagttgacccattctaccggcacagtctcttccattcctatcctcctgcagtgtcgggcatcccccctatgatcccacccactggcccttttggttcactacaaggagcatttcagccgaagacatccaaccctatcgatgtcgctgctcggcctgggacagtcccacacactttactccaaaaggacccgaggttgacagatcctttcagacctatgttaaggaaaccagggaagtggtgtgctatgcatgttcacatcgcctggcagatttaccaccaccaacagaaagtcaagaaacagatgcagtcagacccacataagctggactttggactgaaacctgagttcctgagccgccctccaggccccagtctttttggagccatccaccacccccatgacctggcacggccttcaactttgttctctgccgctggtgctgcacacccaactgggaccccttttgggccacctcctcatcacagcaacttcctcaaccctgctgcccacctagagccttttaatcggccgtctacattcacaggcctagcagcagttggtggcaatgccttcgggggacttggaaatccttccgttacacccaactcaatgttcggccacaaggatggccccagtgtgcagaactttagcaaccctcacgaaccctggaaccggctgcaccgaacgcctccgtcgttcccgacccctccgccctggctgaagccaggggagctggagcgcagcgcgtccgctgcagctcatgacagagatagagatgtagataaacgagactcatctgttagtaaagatgacaaagaaagggaaagcgtcgagaagagacactccagccacccttcaccagcacctgtcctcccggtgaatgccctgggacatacccgcagctccactgaacagatccgggctcatctgaacactgaggctcgggagaaggacaaacccaaagagagggagagagaccactcggaatcccgcaaggacctggccgccgacgagcacaaggcgaaagagggccacctgcccgagaaggacgggcacggccacgaggggcgcgccgcgggcgaagaggccaagcagctggcccgggtgccgtctccctacgtgcggaccccggtggtggagagtgccaggcccaacagcacctcgagccgggaggccgagccgcgcaagggtgagccggcctacgagaaccccaagaagagctccgaggtcaaggtgaaggaggagcggaaggaagaccatgacctgcctccagaggccccgcagacccaccgggcctcggagccgccgcctcccaactcctcgtccagcgtgcacccggggcccctggcctcgatgcccatgacggtgggggtgacgggcattcaccccatgaacagcatcagcagcctggacaggactcgcatgatgacccccttcatgggcatcagccccctcccgggcggagagcgcttcccgtacccttctttccactgggaccccatccgggaccccttgagggatccttaccgagaacttgacattcaccggagagacccgctgggcagggacttcctgctaaggaacgacccgctccaccggctctcgactccccggctgtacgaagccgaccgctccttcagggaccgggagcctcacgactacagccaccaccaccaccaccaccaccacccgctgtctgtggaccctcggcgggagcacgagcggggaggccacctggacgagcgggagcgcttgcacatgctcagagaagactacgagcacacgcggctccactccgtgcaccccgcctccctcgacggacacctcccccaccccagcctcatcaccccgggactccccagcatgcactatccccgcatcagccccaccgcgggcaaccagaacggactcctcaacaagacccctccgacagcagcgctgagcgcacctcccccgctcatctccacgctggggggccgcccggtctctcccagaaggacgactcctctgtccgcagagataagggagaggcccccttcccacacgctgaaggatatcgaggcccgataagccgagaacaggagcaagaacgaggaagaagaaaccctaggcagacaccaggccaggcttgagagacagaactcctgcatggctcacacagactgggggggaaagccccaccccttccccttgtaaaaaatgtatagactcagtgcacattttgaaatgttttgtatattatatgttgagatttttcagatcttttagcccagtcatatgttctcacgtctcctactttttgtttctcgtataaaactttttgatttgaaccaaaacagtgaagatgacaacacacaccaattggatgataattgtagcgggggcggtgggggggagaagtccacgccatccatcatgcaaaattctttcagatgaggtgggaaggccgtgtacatagttatgtaaaaagagattgcttcatgagctaatggttcatatatgcaaaagggtaagatgaaagctttactttgtacaaatgtaaatagataaagtaacataatacattaatacttcttaaaatgtgctatttgcaaacttacttaatatcagtgaacacagtcggctaaagctgtgttcccatatattgttatagacagctaaacccttcaactatgcaatgaatgttcgggcttttcacaaaagcccgcctaactcaaaggagccttttcaaatccatttacagcatacttaaggtcatattttccctgaacaagcgcttacgtgatatgactctgttttccttgcttgttttttttcaaacggagaaacatcctgttttgcaaattggaccccaggctggaacttagcatctgaagttgccgcttgtgggctctgggggaaagtgtagccccggagaggtaactgaggacatgagcaaccagtgccagggagggtgggatttgccagatgccaaaatcaggggacgggtggtggtgtctgtcagacacacacaggtcgccagtgacttcacacacacctcatgtgagaaccatgccttttttagtgtgtcctatttcatacctgtacacacttcctcgttttgtaatgagatttacttacacccaaacagatcctgaaagaaagcttcaagttttctcagatgatggatatgttttcactgtattcaataactgacggatgtaaggtgcacgtttcctgatgtgacgcactgtattccagctggtgatcaagtctgggaacagccgtaacaggtcaaccttgtggagccatcgcgagttagagggtgaaagatggcagaaaaaaaagtcttgtgtgtgagtgtgttttttgagtttgcatcaatcttaatgtctcttcataatacttttataatacattaagcctcttgtctacatatttggagagaatatgactttactagcagagaaatacaatatatcttgtctactggactgtaaaatatatgtatgaaataaaattagttccatttggtcttctagtatattaaagtgctatctgacgttgttatcctgtttttgcaaaaaaaaaaaaaaaaaaaagttaactacagaccattgtttctaataagcagagagatctattttagtagtaaactgaaggtttagttgtgagcttcagattttgtgaactccagatgttgtgcggtgtttttttttttttttaagacaacaactaaaaaaatgcaaggaatatgtacactggaactgtagtggtagctttcagtattgtaaagagattgttctatacggacctttttgctgtttatcctgtatgtaataaagtcctttctagatcctatgtgaaaagaaaagtgaagcaactgaatcttcagcatgttctcatcggcggagccttcttgtgtaatgtaaactgtgccatgttattaaaaaatgtgaact

SEQ ID NO: 215 - DNA, 5174 bp, Homo sapiens
gagtgcgctttagctgctgcgccacgcgcgcctcgggcctgggcgcagaggatcggccgggcgcggcgggaaggaggctgcgggcagcgaggagcggctggcgctcgaggcggcggacggcaccatgtccccggggagcggggtgaagagcgagtacatgaagcgctaccaggagccgcgctgggaggagtacgggccgtgctacggcgagctgctgcactaccgcctaggccgccggctgctggagcaggcgcacgcgccctggctctgggacgactggggcccggccggctcctcggaggactcggcgtcgtcagagtcgtcgggcgccgggggccccgcaccccggtgcgccccgccctcgcccccgccgcccgtagagccggcgacccaggaggaggcggaacggcgggcgcgcggggccccggaggagcaggacgcggaggccggggacgcggaggccgaggacgcggaggacgcggctctgccagcactgccagtgaaagatgtagaagataaacctgaacaacaaaccagaacaagagagactgacaaatcacccaccagtactgagcctcgacagcaaccaagtgccttatttgctagaggaaacaggaaagcggtcaaaagtccccaaagatcatcgagtaaaataaaagaaaacaagcatccatttgctctttatggctggggagaaaaacagaccgatacaggaagccagaagactcacaacgtctgtgcgtccgctcctgtgcatgagattcatgaatcagcattacgagccaagaacagaagacaggtggaaaaaaggaaactggttgctcaaaggcagcgagctcactctgtggatgtggagaagaacagaaagatgaaggcttcctcctcagagaacccgtggatgacagaatacatgaggtgctattcggcaagagcttaaagaaacacttgcgtggacagcctcttttaaaaagtgtaaatgactgaaaggaaaaacaaaacaaaaaccatcaaaagaaacggacacaggtttaagaaaccaactgattatgcaaggttttttttagggaatttgtaaaagattgttttattttgatgaatattggtcacctacctcggcagtagggcagacagttgaagccatagacatttggttatttatgaagataattccctaaatctttgatattcttataaggtttttgttttaaagcatcttaatcttttaagatactgacaccaaatgcctttaaatggcaacagatgcttacagttcagtattcttttcataagcttaggtagagcctattatcatcttgttctaaataactttccagattccatagctataagatcattccatcctacagcataagactcgttttccttatatgccgttttgtttgtgaaagaatatcaagtcaaaaatgagtgtcagcactactactgattccatgtataatgaaagtagaactttgctagttcctgaaaatttttaacttatttgtatttcagttcagcagcatctttatgtagattgtgatatttaagaattatctgggctgggcgagggtctctttttctctttcagtgatcatctaggcagttattatttaatagtttaatagctcaagtacattccaatagacgaagtgcacacaacacaatatgtgtgtacagtagtagtaaagtttcttttgagtagtcaaagactcactttttttattgcctttttttttttttttaaagaatacatactgtggattcagtcccttgtcacacttgaccttttggcatacacccactgtggacttttgcctcttctgtaatggctggcaatgacatttcaaacttacaatctggaattgcacttggtacattggcattgcttgttccactgggatggggaccagtgtgaagatgcctgttagatagactgcccacccctactttctctttttctttatagcacttaacaataacaaagtcttgatgatgtacagtattcaaactttaggttgaaatacgttactctttgattcctagccagtagatcttatctacactttaatgggagagaatggtggtgtgtgagtaggcacaaatttatgtaaatagtgctccttctctttagtatgtttgctttgggggtagaaaaatggttttaacaaacactggtttccatcaaatgaatgatgtcttctccatcctgtggagacaagaatctgctagaaggatatgtgctaagttccttataagagataatggtgctctgcctatgccagcttggcacccgaagatgtgtgagtggacgtgaggctgagtattaccttagtatttttctctgggtctttgggaaaccatagtcaatttttagaacatattgctttcattccccataaactcttcacacatgataactgtttaagctttgaaaacacatactgaagtattgtgagcttaaaaaaactttttaaatatttgcatagttttgaggtgaatttgtttccttacagatctctcctaatcattgagatgtatatttcaaaagaggaaattttacatgttgtccaaaacagccttgctagtaactggtgaattttggtattaactattattaaagtctttaaacgacacaggtacctaaagatcaccttaatgtggcaatttgtgatggtgtagctagctgattgtgaaaactgttcctttaaagtcgcttcttgcatgttcggtgttagtcatccagctcaggcttgtgttgcagctgacaatctaggaaagacggccttagagagtggtgcaggccccacactgacggactgccttagaaacccgacttcctctagactttgaaccgccagacttttctcttgtttagaaaacaaacttatatttaatgtacttactacttaaaactccagacagagatataatgtagaaggcaaatattggccaattttttcctctttttaagtggaagacaaatgaacgggatttttaaagtgcttttaaagtgcatgaatggttaataaatcagtatgaattgtaagccttcatcttacatccaagtccttagttggttagggtttcttttctttcttttttaaagagtgtcaattaccttttgaacctgtgaaaatttgatagttgttaacagtctgatggtcctaattctttcttttcattctagaaatgaatgtggttgtaatcatgttcctaattcttgggacaacctgcaagacagtgagacagtttaaaaattacctttcatgttgaaaaagtctgaaacagagaacccaatgatatttaaaataaatgctacataaaactctttttaaaattttgattttaacttaattaaaacaatgtcataaatatgctttttgattttgttactgcttttaatattaaagtaatagaatattgaagcaatattgtctagcactctgctggacattaagtccgcgggaggagaagtgaacaggaatcgattctttgtcttttaactgcccttagttaggagatgttaaaatacttggcacctctggttatatgtatgttatgtgtgttctcccccctaaaatttctaagcacatttattcacttttaaaatgaatctttaaaagattatagttagtagttatagttaatattctatttacttggaaaaatgtgaataaatggatcttcaaaagattcattttaaaaatgaataaatgtataataggctataggtgatcttacttgcgtattaggtaggaggcacatatttataccatttcatatgtaatatctttgtcattgtgtttcatcgaagatcaattgctagcaacttgaagggtatttatacttgggtcacttgaactcagctgactaaattgtaagaacgagagcaagcaagatggctgttattggaagccataacttccagaagataattctgcacaattcgtaagttaaaaaaaatctgtagggtcttccactatcctttttcaggttgataatgctgttctgggcacacactttgtaaatggaatgttatggtacagtcgcctctcagtatccatggggcattggttccaggcctcccttaggatgccaaactccatggatactcaaaccccttctataaaatggtgtagtatttgcatatatcctagacacatcctcctgtatgctttaaatcatctctagattacttaaaatacctaatacaatgtaaatgctctgtaaatagttgttatactatattgtttagggaataatgacaaggaaaaaaaagcctgtacatgttcagcacaagtgaaaccatcctttttgcccccaaatattttcaatttgtatttggttgaatccatggatgcagaactcacggatacagagggccgactgtactttctttaaagtgttcaaaagtattactagcaaagaggaggaggagcaaagcatatatcagaagtaaaacaatttttcttgttgactgctttggtaaaaaacagtttgatggatagttttacatttcactggactagataaaaaatggtgctaatatttatgtagcttgatgctatagttgctttggtatcaaacttaatacctaacccatataagatccttattatataattttgtgatcagtaaaatgatattttaaagagtgatcttaaaaatatgacctggtcattgcacaacgtttgcatttgaaatgaatttttgtactatagggtggatatggagttattcagtgcaagtgtgtgcttaatatcaaaccctatgcaaggagctatgtctagatttttggtccaaatttgcctccttcaagcctactagtgtgagatggaaaaaaatcgattgctcttttaatattatttccattttgaaattctcgacacttgaatgaaggcagtagaggcctctttttggatttctcttctaataacaaaactttatttagggaaggtttccctgtgctatcgtaagtttgttttgagcactgcattcactttaaaattctggaggaacaaaggctgggcacataatcacaaagcccaggccacacaataattcggggttgtattttctaagaactatgtattgtttttagcttatagttaatattgtatttacttggaaaaatgtgaataaagttaattaacattacaaaaaaaaaaaaaaaa

SEQ ID NO: 216 - DNA, 2530 bp, Homo sapiens
aaaatggatcctcacttcttcacttggatataataatatagactgccgacattctgggaactgatcagtcttccagcttccagtgtggtgccctccctcaattgtgctgagtgtcccccaatccagagatattctgtaatttcttcctcagaaagaaacaaaacaaaattctgatcttcccagatgaagataatggattctgaattaatgcatagtatagtaggaagctatcataaacctccagaaagagtatttgttccctcattcacccagaatgaaccatctcagaattgccatcctgcaaacttagaagttacctctcctaagatacttcatagcccaaatagccaagctcttattttagccttaaaaactcttcaggaaaaaattcatcgtttagagctggagagaacacaagctgaagataacctgaacattctttccagagaagcagcacagtataagaaggccttagagaatgaaacaaatgagagaaatctggcacaccaggagctgataaagcagaaaaaagatataagtatacagttaagctcagcccagtctcgttgtactcttctagagaagcaactagaatatacaaagagaatggttctcaacgtagagcgagaaaagaacatgatcctagaacaacaggcccagcttcagagggaaaaagaacaagatcagatgaagctgtatgcaaaacttgaaaagcttgatgtcttagaaaaagagtgtttcagacttacaacaactcagaaaactgctgaggacaagattaaacatttagaagaaaaacttaaggaagaagaacatcagcgtaagctatttcaagacaaagcttctgagcttcaaactggacttgaaatcagtaaaattataatgtcttcagtttcaaatctaaagcactccaaggaaaagaagaaatcttcaaagaaaactaaatgtataaagagacgaccaccttggcaaatttgttcaaagtttggagcactgccttttgtggctgaaaagatgaggcaacatcgtgacccacatatccttcagaaaccttttaacgtgactgagactagatgtctccccaagccttctagaacaacttcctggtgtaaagctattcctcctgactcagaaaagtccatttccatttgtgacaatttatctgaacttttgatggcaatgcaagatgagctggaccaaatgagcatggagcaccaagaactactgaaacaaatgaaggaaactgaaagtcattcagtctgtgacgacatagaatgtgaactagagtgtttactcaagaaaatggaaattaaaggagaacaaatctccaaactgaagaagcatcaagacagtgtctgtaaactgcagcaaaaagttcaaaactcaaagatgagtgaagcttcaggtattcagcaagaagacagctaccctaaaggatcaaagaacataaaaaatagccccagaaaatgtttgactgacactaacctttttcagaaaaacagcagctttcatccaatacgagttcataatcttcaaatgaaattgagaagagatgatatcatgtgggaacagtaacaaaacagcaaaactgtcaccttaatgaactttgtcagtgagaccttgaattgtctaaagtggttttaatttaatataactttgtgacattttgaatcatgtttctagtttctataaaacatgaagttgcagtatttaaaaattaatgcctaatgacctggtgggttccaaataataaattaattgcttttttatttttcttattgattgaagcccgtaacctcatcttgtcttagaaacattgttggctttgcagatatcttaagctaaatttaagaaattgtactagattgacaatattcaaaattgagttaaatccaagctacaagtaccattcattccacttttcatttagtaggtttggaaccttaaaaaccaatgttcaatgaacagagttcagaaagatcatttagctttcctggtgccttctttctattttgttttagagctgtgaaatgtttttctcttttggaaaaggaaaaacttaatagttacacagttttgtgaagaagcctttaatccaagttttatgagacagtaggaacctatagctacttaatttttaggagacagtaattcagttgcagaagctttcctctgctattcccattctcttttacaaaactagttttttttaaaaaatcaatgatcaattttatcttactactttataacttttgctgacttttattctttgcattgtatgtaatgtccatcagtataaattgagactgtgaatttctaggacccacaaaagtggtattttttttttgtacaagaaagtatagaggaagaggaagctgggcattaaattacctcatccagcagaaattcacggtagtatggtatatttttattttttatattttaaaatcaataatgtcaaatgtcattgtgtatgcatgctttataataaatttacacttgatcatttttctggaaaaaaaaaaaaaaa

SEQ ID NO: 217 - DNA, 10540 bp, Homo sapiens
aggagccggaggaggagccgccgccgccgttgacccggccgccggccgggagctgggagagatgcggagcccggccaccggcgtccccctcccaacgccgccgccgccgctgctgctgctgttgctgctgctgctgccgccgccactattgggagaccaagtggggccctgtcgttccttggggtccaggggacgaggctcttcgggggcctgcgcccccatgggctggctctgtccatcctcagcgtcgaacctctggctctacaccagccgctgcagggatgcgggcactgagctgactggccacctggtaccccaccacgatggcctgagggtttggtgtccagaatccgaggcccatattcccctaccaccagctcctgaaggctgcccctggagctgtcgcctcctgggcattggaggccacctttccccacagggcaagctcacactgcccgaggagcacccgtgcttaaaggctccacggctcagatgccagtcctgcaagctggcacaggcccccgggctcagggcaggggaaaggtcaccagaagagtccctgggtgggcgtcggaaaaggaatgtaaatacagccccccagttccagccccccagctaccaggccacagtgccggagaaccagccagcaggcacccctgttgcatccctgagggccatcgacccggacgagggtgaggcaggtcgactggagtacaccatggatgccctctttgatagccgctccaaccagttcttctccctggacccagtcactggtgcagtaaccacagccgaggagctggatcgtgagaccaagagcacccacgtcttcagggtcacggcgcaggaccacggcatgccccgacgaagtgccctggctacactcaccatcttggttactgacaccaatgaccatgaccctgtgttcgagcagcaggagtacaaggagagcctcagggagaacctggaggttggctatgaggtgctcactgtcagggccacggatggtgatgcccctcccaatgccaatattctgtaccgcctgctggaggggtctgggggcagcccctctgaagtctttgagatcgaccctcgctctggggtgatccgaacccgtggccctgtggatcgggaagaggtggaatcctaccagctgacggtagaggcaagtgaccagggtcgggacccgggtcctcggagtaccacagccgctgttttcctttctgtggaggatgacaatgataatgccccccagtttagtgagaagcgctatgtggtccaggtgagggaggatgtgactccaggggccccagtactccgagtcacagcctcggatcgagacaaggggagcaatgccgtggtgcactatagcatcatgagtggcaatgctcggggacagttttatctggatgcccagactggagctctggatgtggtgagccctcttgactatgagacgaccaaggagtacaccctacgggtgcgagcacaggatggtggccgtcccccactctctaatgtctctggcttggtgacagtacaggtcctggatatcaacgacaatgcccccatcttcgtcagcacccctttccaggctactgtcctggagagtgtccccttaggctacctggttctccatgtccaggctatcgacgctgatgctggtgacaatgcccgcctggaataccgccttgctggggtgggacatgacttccccttcaccatcaacaatggcacaggctggatctctgtggctgctgaactggaccgggaggaagttgatttctacagctttggggtagaagctcgagaccatggcactccagcactcactgcctcggccagtgtcagcgtgactgtcctggatgtcaacgacaacaatccaacctttacccaaccagagtacacagtgcggctcaatgaggatgcagctgtgggcaccagcgtggtgacggtgtcagctgtggaccgtgatgctcatagtgtcatcacctaccagatcaccagtggcaatactcgaaaccgcttctccatcaccagccaaagtggtggtgggctggtatcccttgccctgccactggactacaaacttgagcggcagtatgtgttggctgttaccgcctccgatggcactcggcaggacacggcacagattgtggtgaatgtcaccgacgccaacacccatcgtcctgtctttcagagctcccactatacagtgaatgttaatgaggaccggccggcaggcaccacggtggtgctgatcagcgccacggatgaggacacaggtgagaatgcccgcatcacctacttcatggaggacagcatcccccagttccgcatcgatgcagacacgggggctgtcaccacccaggctgagctggactatgaagaccaagtgtcttacaccctggccattactgctcgggacaatggcattccccagaagtccgacaccacctacctggagatcctggtgaacgacgtgaatgacaatgcccctcagttcctgcgagactcctaccagggcagtgtctatgaggatgtgccacccttcactagcgtcctgcagatctcagccactgatcgtgattctggacttaatggcagggtcttctacaccttccaaggaggcgacgatggagacggtgactttattgttgagtccacgtcaggcatcgtgcgaacgctacggaggctggatcgagagaacgtggcccagtatgtcttgcgggcatatgcagtggacaaggggatgcccccagcccgcacacctatggaagtgacagtcactgtgttggatgtgaatgacaatccccctgtctttgagcaggatgagtttgatgtgtttgtggaagagaacagccccattgggctagccgtggcccgggtcacagccactgaccccgatgaaggcaccaatgcccagattatgtaccagattgtggagggcaacatccctgaggtctttcagctggacatcttctccggggagctgacagccctggtagacttagactacgaggaccggcctgagtacgtcctggtcatccaggccacgtcagctcctctggtgagccgggctacagtccacgtccgcctccttgaccgcaatgacaacccaccagtgctgggcaactttgagatccttttcaacaactatgtcaccaatcgctcaagcagcttccctgggggtgccattggccgagtacctgcccatgaccctgatatctcagatagtctgacttacagctttgagcggggaaatgaactcagcctggtcctgctcaatgcctccacgggtgagctgaagctaagccgcgcactggacaacaaccggcctctggaggccatcatgagcgtgctggtgtcagacggcgtacacagcgtgaccgcccagtgcgcgctgcgtgtgaccatcatcaccgatgagatgctcacccacagcatcacgctgcgcctggaggacatgtcacccgagcgcttcctgtcaccactgctaggcctcttcatccaggcggtggccgccacgctggccacgccaccggaccacgtggtggtcttcaacgtacagcgggacaccgacgcccccgggggccacatcctcaacgtgagcctgtcggtgggccagccgccagggcccgggggcgggccgcccttcctgccctctgaggacctgcaggagcgcctatacctcaaccgcagcctgctgacggccatctcggcacagcgcgtgctgcccttcgacgacaacatctgcctgcgggagccctgcgagaactacatgcgctgcgtgtcggtgctgcgcttcgactcctccgcgcccttcatcgcctcctcctccgtgctcttccggcccatccaccccgtcggagggctgcgctgccgctgcccgcccggcttcacgggtgactactgcgagaccgaggtggacctctgctactcgcggccctgtggcccccacgggcgctgccgcagccgcgagggcggctacacctgcctctgtcgtgatggctacacgggtgagcactgtgaggtgagtgctcgctcaggccgttgcaccccgggtgtctgcaagaatgggggcacctgtgtcaacctgctggtgggcggtttcaagtgcgattgcccatctggagacttcgagaagccctactgccaggtgaccacgcgcagcttccccgcccactccttcatcacctttcgcggcctgcgccagcgtttccacttcaccctggccctctcgtttgccacaaaggagcgcgacgggttgctgttgtacaatgggcgtttcaatgagaagcatgactttgtggccctcgaggtgatccaggagcaggtccagctcaccttctctgcaggggagtcaaccaccacggtgtccccattcgtgcccggaggagtcagtgatggccagtggcatacggtgcagctgaaatactacaataagccactgttgggtcagacagggctcccacagggcccatcagagcagaaggtggctgtggtgaccgtggatggctgtgacacaggagtggccttgcgcttcggatctgtcctgggcaactactcctgtgctgcccagggcacccagggtggcagcaagaagtctctggatctgacggggcccctgctactaggcggggtgcctgacctgcccgagagcttcccagtccgaatgcggcagttcgtgggctgcatgcggaacctgcaggtggacagccggcacatagacatggctgacttcattgccaacaatggcaccgtgcctggctgccctgccaagaagaacgtgtgtgacagcaacacttgccacaatgggggcacttgcgtgaaccagtgggacgcgttcagctgcgagtgccccctgggctttgggggcaagagctgcgcccaggaaatggccaatccacagcacttcctgggcagcagcctggtggcctggcatggcctctcgctgcccatctcccaaccctggtacctcagcctcatgttccgcacgcgccaggccgacggtgtcctgctgcaggccatcaccagggggcgcagcaccatcaccctacagctacgagagggccacgtgatgctgagcgtggagggcacagggcttcaggcctcctctctccgtctggagccaggccgggccaatgacggtgactggcaccatgcacagctggcactgggagccagcggggggcccggccatgccattctgtccttcgattatgggcagcagagagcagagggcaacctgggcccccggctgcatggtctgcacctgagcaacataacagtgggcggaatacctgggccagccggcggtgtggcccgtggctttcggggctgtttgcagggtgtgcgggtgagcgatacgccggagggggttaacagcctggatcccagccatggggagagcatcaacgtggagcaaggctgtagcctgcctgacccttgtgactcaaacccgtgtcctgctaacagctattgcagcaacgactgggacagctattcctgcagctgtgatccaggttactatggtgacaactgtactaatgtgtgtgacctgaacccgtgtgagcaccagtctgtgtgtacccgcaagcccagtgccccccatggctatacctgcgagtgtcccccaaattaccttgggccatactgtgagaccaggattgaccagccttgtccccgtggctggtggggacatcccacatgtggcccatgcaactgtgatgtcagcaaaggctttgacccagactgcaacaagacaagcggcgagtgccactgcaaggagaaccactaccggcccccaggcagccccacctgcctcttgtgtgactgctaccccacaggctccttgtccagagtctgtgaccctgaggatggccagtgtccatgcaagccaggtgtcatcgggcgtcagtgtgaccgctgtgacaacccttttgctgaggtcaccaccaatggctgtgaagtgaattatgacagctgcccacgagcgattgaggctgggatctggtggccccgtacccgcttcgggctgcctgctgctgctccctgtcccaaaggctcctttgggactgctgtgcgccactgtgatgagcacagggggtggctccccccaaacctcttcaactgcacgtccatcaccttctcagaactgaagggcttcgctgagcggctacagcggaatgagtcaggcctagactcagggcgctcccagcagctagccctgctcctgcgcaacgccacgcagcacacagctggctacttcggcagcgacgtcaaggtggcctaccagctggccacgcggctgctggcccacgagagcacccagcggggctttgggctgtctgccacacaggacgtgcacttcactgagaatctgctgcgggtgggcagcgccctcctggacacagccaacaagcggcactgggagctgatccagcagacagagggtggcaccgcctggctgctccagcactatgaggcctacgccagtgccctggcccagaacatgcggcacacctacctaagccccttcaccatcgtcacgcccaacattgtcatctccgtagtgcgcttggacaaagggaactttgctggggccaagctgccccgctacgaggccctgcgtggggagcagcccccggaccttgagacaacagtcattctgcctgagtctgtcttcagagagacgccccccgtggtcaggcccgcaggccccggagaggcccaggagccagaggagctggcacggcgacagcgacggcacccggagctgagccagggtgaggctgtggccagcgtcatcatctaccgcaccctggccgggctactgcctcataactatgaccctgacaagcgcagcttgagagtccccaaacgcccgatcatcaacacacccgtggtgagcatcagcgtccatgatgatgaggagcttctgccccgggccctggacaaacccgtcacggtgcagttccgcctgctggagacagaggagcggaccaagcccatctgtgtcttctggaaccattcaatcctggtcagtggcacaggtggctggtcggccagaggctgtgaagtcgtcttccgcaatgagagccacgtcagctgccagtgcaaccacatgacgagcttcgctgtgctcatggacgtttctcggcgggagaatggggagatcctgccactgaagacactgacatacgtggctctaggtgtcaccttggctgcccttctgctcaccttcttcttcctcactctcttgcgtatcctgcgctccaaccaacacggcatccgacgtaacctgacagctgccctgggcctggctcagctggtcttcctcctgggaatcaaccaggctgacctcccttttgcctgcacagtcattgccatcctgctgcacttcctgtacctctgcaccttttcctgggctctgctggaggccttgcacctgtaccgggcactcactgaggtgcgcgatgtcaacaccggccccatgcgcttctactacatgctgggctggggcgtgcctgccttcatcacagggctagccgtgggcctggaccccgagggctacgggaaccctgacttctgctggctctccatctatgacacgctcatctggagttttgctggcccggtggcctttgccgtctcgatgagtgtcttcctgtacatcctggcggcccgggcctcctgtgctgcccagcggcagggctttgagaagaaaggtcctgtctcgggcctgcagccctccttcgccgtcctcctgctgctgagcgccacgtggctgctggcactgctctctgtcaacagcgacaccctcctcttccactacctctttgctacctgcaattgcatccagggccccttcatcttcctctcctatgtggtgcttagcaaggaggtccggaaagcactcaagcttgcctgcagccgcaagcccagccctgaccctgctctgaccaccaagtccaccctgacctcgtcctacaactgccccagcccctacgcagatgggcggctgtaccagccctacggagactcggccggctctctgcacagcaccagtcgctcgggcaagagtcagcccagctacatccccttcttgctgagggaggagtccgcactgaaccctggccaagggccccctggcctgggggatccaggcagcctgttcctggaaggtcaagaccagcagcatgatcctgacacggactccgacagtgacctgtccttagaagacgaccagagtggctcctatgcctctacccactcatcagacagtgaggaggaagaagaggaggaggaagaggaggccgccttccctggagagcagggctgggatagcctgctggggcctggagcagagagactgcccctgcacagtactcccaaggatgggggcccagggcctggcaaggccccctggccaggagactttgggaccacagcaaaagagagtagtggcaacggggcccctgaggagcggctgcgggagaatggagatgccctgtctcgagaggggtccctaggcccccttccaggctcttctgcccagcctcacaaaggcatccttaagaagaagtgtctgcccaccatcagcgagaagagcagcctcctgcggctccccctggagcaatgcacagggtcttcccggggctcctccgctagtgagggcagccggggaggcccccctccccgcccaccgccccggcagagcctccaggagcagctgaacggggtcatgcccatcgccatgagcatcaaggcaggcacggtggatgaggactcgtcaggctccgaatttctcttctttaacttcctgcattaaccctgggccgtggttcctacgcccgaggctcccttcccttccccagccgcactcatgccctgctcctgtcttgtgctttatcctgccccgctccccatcgcctgcccgcagcagcgacgaaacgtccatctgaggagcctgggccttgccgggaggggtactcaccccacctaaggccatctagtgccaactccccccccaccattcccctcactgcactttggacccctggggccaacatctccaagacaaagtttttcagaaaagaggaaaaaaagaatttaaaaaaggatctccactcttcatgacttcagggattcattttttttatacgctggaaattgactcccctttcccttcccaaagaggataggacctcccaggatgcttcccagcctctcctcagtttcccatctgctgtgcctctgggaggagagggactcctggggggcctgcccctcatacgccatcaccaaaaggaaaggacaaagccacacgcagccagggcttcacacccttcaggctgcacccgggcaggcctcagaacggtgaggggccagggcaaagggtgtgcctcgtcctgcccgcactgcctctcccaggaactggaaaagccctgtccggtgagggggcagaaggactcagcgcccctggacccccaaatgctgcatgaacacattttcaggggagcctgtgcccccaggcgggggtcgggcagccccagcccctctccttttcctggactctggccgtgcgcggcagcccaggtgtttgctcagttgctgacccaaaagtgcttcatttttcgtgcccgccccgcgccccgggcaggccagtcatgtgttaagttgcgcttctttgctgtgatgtgggtgggggaggaagagtaaacacagtgctggctcggctgccctgagggtgctcaatcaagcacaggtttcaagtctgggttctggtgtccactcacccaccccaccccccaaaatcagacaaatgctactttgtctaacctgctgtggcctctgagacatgttctatttttaaccccttcttggaattggctctcttcttcaaaggaccaggtcctgttcctctttctccccgactccaccccagctccctgtgaagagagagttaatatatttgttttatttatttgctttttgtgttgggatgggttcgtgtccagtcccgggggtctgatatggccatcacaggctgggtgttcccagcagccctggcttgggggcttgacgcccttccccttgccccaggccatcatctccccacctctcctcccctctcctcagttttgccgactgcttttcatctgagtcaccatttactccaagcatgtattccagacttgtcactgactttccttctggagcaggtggctagaaaaagaggctgtgggcaggaaagaaaggctcctgtttctcatttgtgaggccagcctctggcttttctgccgtggattctcccccgtcttctcccctcagcaattcctgcaaagggttaaaaatttaactggtttttactactgatgacttgatttaaaaaaaatacaaagatgctggatgctaacttggtactaaccatcagattgtacagtttggttgttgctgtaaatagggtagcgttttgttgttgttgttttttcatgccccatactactgaataaactagttctgtgcgggtacagca

SEQ ID NO: 218 - DNA, 7102 bp, Homo sapiens
ggcctgactagtcgtcgccgtcttcgcggctgctatgaccagcgggcgaggcgcccttcgcagctccgcgcaacgctagtcgcggccgtgcgcccgccgtagccgtctgcgtcccagcgcggccgctcccgcggccccctcggctttgccagcgccgcctgcgaggcggaggcaggatgaagatgactgtggatttcgaggagtgtctgaaggactcgccccgcttcagggcagctttggaagaagtagaaggtgatgtggcagaattggaactaaaacttgataagcttgtgaaactttgtattgcaatgattgatactggaaaagccttttgtgttgcaaataaacagttcatgaatgggattcgagacctggctcagtattctagtaatgatgctgtcgttgagacaagtttgaccaagttttctgacagtcttcaagaaatgataaattttcacacaatcctgtttgaccaaactcagagatcaattaaggcacagcttcagaactttgttaaagaagatcttagaaaattcaaagatgccaagaagcaattcgaaaaagtcagtgaagaaaaagaaaatgcgttagtaaaaaatgcccaagtacaaagaaacaaacaacatgaagttgaagaagccaccaacattctgacagcaacaagaaaatgtttccgacacatagccctcgattatgtgcttcagattaatgttcttcaatcaaaaaggagatcagaaatcctaaaatcaatgttgtcatttatgtatgcccatttggccttctttcatcaaggatatgatctgtttagtgaacttggaccctacatgaaggatcttggtgcacagttggatcgactggttgtggatgcagcaaaggagaaaagagaaatggagcaaaaacattccaccattcaacaaaaggatttctccagtgatgattctaagttagaatataacgtagatgctgcaaatggcatagttatggaaggatatctgttcaaacgagccagcaatgccttcaaaacttggaacaggcgctggttttcaatacagaataatcagttggtttaccagaaaaaatttaaggataatccgactgtggtagttgaagacctcaggctttgcacagtgaaacattgtgaagacatagagcgacgattctgctttgaggtggtctcgccaacaaaaagttgcatgctccaggcagattccgaaaagctgcgccaggcatggattaaggctgttcagaccagtattgctactgcttatagagagaagggtgatgaatcagagaagctggataagaaatcatctccatccacaggaagcctagattctggaaatgagtccaaagagaaattattgaaaggagaaagtgcgcttcagcgggtccagtgtatccctggcaatgccagctgttgtgactgtggcctggcagatccacggtgggccagcatcaacctgggcatcaccttgtgtatcgagtgctccggaattcaccggagccttggggttcatttttcaaaagtacgatctttaactttagacacctgggagccagaacttttaaagcttatgtgtgagttggggaatgatgttataaatcgagtttatgaagctaatgtggaaaaaatgggaataaagaaaccccaaccaggacaaagacaggagaaggaggcatatatcagagcaaaatatgtggagaggaaatttgtggataaatattctatatcattatcacctcctgagcagcaaaaaaagtttgtctctaaaagttctgaagaaaagaggctgagcatttctaaatttgggccaggggaccaagtcagagcatctgcccaaagttcagtcagaagtaatgacagtgaaattcagcagagctctgatgatggaagagaatctttaccctccacggtgtcagccaatagtttatatgagcctgaaggagaaaggcaagattcttctatgtttcttgactcgaaacatcttaatccaggacttcagctttatagggcgtcatatgaaaaaaaccttcctaaaatggctgaggctttggctcatggtgcagacgtgaactgggccaattcagaggaaaacaaagcgacgccacttattcaggctgtattagggggctctttggtgacgtgtgagttcctcctacagaatggtgctaatgtcaaccaaagagatgtccaagggcggggaccattgcaccatgccaccgtcttagggcacacagggcaggtatgtttattcctaaaacgaggtgccaatcaacatgccactgatgaagaagggaaagaccctttgagcatagctgtggaagcagccaatgctgatatagtcaccttgttacgtttagcaagaatgaatgaagagatgcgggaatcagaaggactttatggacagccaggtgatgaaacttatcaggacatatttcgtgatttttcccaaatggcatccaataatccagagaaactaaatcgtttccagcaagattcacagaaattctgaatttttttaaaaatgggaaaatatgaaatctggtgaccccctaatgtatacagctaaaaattcacaatttttttactgctttaattctacttaattttggtagatattgaatggcttggaaaagaggtacccattcatatatttataaattaaaacatagttatctagtagtaggagaggaacctagtttaggacctcttttattaaaaaagcctatttaaagggctatttctgtagacagaagttcagtctagatttaggccatctctaggttacaagatgataggaggttagacaaaagtgattcttttgccaatgggtggtggcattgatttttttcctccatgcatcttgcccaggatcactcagtcaagcatgtcttcatcaagtggaagccaactgtcctgcctgcctcaagaatatgtgttttctttagcttccctgaggatttttggtggttcagaaataggtgtgtgtgttgatgtgtttttggtaacctagctttcatacacataatatatgatttattagaactagagaatgtgttttccccgtttgttcataaatgcggtcggttatacttcttaggtgacaggttattgtccagtactttaatgtatgtatgtataatggctgtacaggtagaccataattcagtcctttagatttattttatgcagcaaaaagaagctctttttttttttaatcacaaaaaaaaaccccagttcaaaatgtgtagttcttcattgttgggttgattccccaaaaccttgacagatgtatcgatggaataaaagtatgttttaaaggttacttgaatgtcacaaaattatgccttcatcaaaactttaaaggaaaaatcaatttataaaatcatgtaggccatttttatatttgaaatttgtccttttaaagatagttttgctgttgctcctagtgaaagaaaaatctctgtacaaaggagaaaaagaaccccacttattcttagttaatactaaaatatagcaataaattgctgtttattttttctacatctattttgtgtacttgtacacagtgtacattcttttaaattatatcgtgtatatagctttagtattcggttacatgattcacagacccctgaattccaatattatggataaacattaccatttatatgctacaaattagtctgattccatctttgaaaatgtcttaaagtataaaataattaatttgcttttttttttttttttttcccgagatggcgtcttgctgtgtcacccaggctggagtgcagtggcacgatctcagctcactgcagcctcctcctcttgggttcaagcaattctcctgcctcagcctcccgagtagctgggactacaggcacccgccaccattccgagctaatttctatatttttagtaaagacgggtttcaccattttggccaggttggtctcaaactcctgacctcaggtgatcagcctgctttagcctcccagagtgctgggattacaggcgtgagccaccgcacccagcctaatttgccttttgattccttcccattgttgtcaaaaattaagtctattcttcttttagaaattatatgtaaatgatattattgatactctttctaaataagaggttttaaaatatataaaaactttatgatccaattatagataaattttctaacatttcccagtcactagggttttataagttgattaaacatcaaatcagaatctagccaagcaggaattatattgaaataagttcacattacagaaaaggttccataatttggccaaactgcatgcatgtaatgcttatttagtaatggtcactgtatgttagataaggataaaaatatatttgtgaattacttctgaggaaatgctaacttccacagcattgtatttaattataacaataacaggaacattaaatctttatctttgctgtttcacctcaaagtcatagatcatctggctttttaggcaccttcactaaaggcaaaaatctgatttgtagtttttattagcatgtaccttgaaattatttgaccaagaagctcaaagaaaagaagtacgttaaagaaaaagaaaaaacctcacttttcctttatagtgtcccttcctgttttaattcctaaagatcctgacttttatctgaggaagtctaggtagttttccttttggatctggccattggtgcgtgtttcattcagatcacctctggaatctctgtggttgtgaaggcaattccttatgagactcttgcctcctgtggcttacgtgatgaattgttaatatggcagtaattaattagtatctacttaaatttagtggtcagaaatgtatttgaagtgccttaaagatgatcatggttcagaatatcttcagagaaagcaaaatctttaatattgcagggagcctagcaatacaaatacacatttctgtggcttgatttcttgaatatgctgagacccaatttggactacatttggcagaaatcatggagtaaacagcaaggctttaaattaaattaatagttacaaggtaggttggctcttaggtgaatttagccatgtcaactaatagcttttatatggtatgtaacaaatctgaattatgttatgctgtgaattattcagtgcattataagaaatcttagttaatcatgcttttgggcttcattagtcaatgtgattggccttttattttctttccataacttatctgctattattagtttcttattccttattattaatctgttagctcattatcattagcttactaacttgaaagttagattaatatcaaaataagaatagcagcactatgaagagttaataaaatgcaatttcatgttagagctagaataaaagtaattgagcagtcatttgcaaatgcttcattataacatttatgtgcttaagatttctaaggttttaaaaagttacctttaatacaatccttagaaactcagaaatttcctgatattcattagattatggtgtttgcctaatttataccggttttcactgtatattttaatgaactttgattggttacttttccagacatacagatttaatttggaatatgaactttggttcttcatgagtgcattttgaaaaagaaaaaaagtacacattcagaatctggccaatttaagtttgtattttaaaaatattttatgcatgttaagtatggtcgcagtaaatgaaattgtgtttaagactaaatttactaccgttttgaacagacattcccagatcattcttatattgtcagataacacttgtgtataatatcactttggaccatggacatgagctggaaaaatgatgtatttttgtagattgtatgtccagaatgactttagaaccgcatgatacggtggaaggagcactggactagtcgtcactaccctttttggattcagggctcctcacaattaaaatgagtgtaatgaaacaaggtgaaaatatagaagcatccctttgtatactgttttgctacttacagtgtacttggcattgctttatctcactggattctcatggtaggatttctgagatcttaatctaagctccaaagttgtctacttttttgatcctagggtgctccttttgttttacagagcagggtcacttgatttgctagctggtggcagaattggcaccattacccaggtctgactgaccaccagtcagaggcactttatttgtatcatgaaatgatttgaaatcattgtaaagcagcgaagtctgataatgaatgccagctttccttgtgctttgataacaaagactccaaatattctggagaacctggataaaagtttgaagggctagattgggatttgaagacaaaattgtaggaaatcttacatttttgcaataacaaacattaatgaaagcaaaacattataaaagtaattttaattcaccacatacttatcaatttcttgatgcttccaaatgacatctacagatatggttttgtggacatctttttctgtttacataaatttatccacttaaaatgtgataatgtggagacaaagcaagatttgattacataaacttttctctgcattggtcttttcactatcttatttgctaacttttcttatttttcttcaacctccccaccctccattttttggatattaaacagggaaagcttgctacattataaagattgttggcaccatttattttacacaaaggctaaaggttaacttttggaaatgatgagctacttttatatatgtgtttactcatgctttgtgatatttctggatcattccagtcataaagacttattacatgtactatttcttgctacctgtgaaaaggtatattttaaagaatgtataaccaacagtccatttactttttattagtatgtagaggatttgtatctaattcatgaatgtagttttacagtagtttgtcattgtaaatggagcaaagtacattatcttctaaaatgtacattatgtaagaattgtaaatatacttaagtaatttgtatgccaaaaaattacaataagtcaataaagatctcacctctgaaaaaaaaaaaaaaa

SEQ ID NO: 219 - DNA, 2591 bp, Homo sapiens
gccaagggcactattggccagttccgttcaacgaagtggttgctttttttagttccggcaatgagttgcgccggggcggcggcggctccccgcctttggcggctgcgcccgggggcccggcggtccctctcagcttatggaagaagaaccagtgtcagatttcgcagttcaggaatgactttagacaatatcagtcgggcagctgtggatcgaataatccgggtggatcatgcaggcgaatatggagcaaaccgcatctatgccgggcagatggctgtcctgggtcggaccagcgtcgggccagtcattcagaaaatgtgggatcaagaaaaggaccatttgaaaaagttcaatgagttgatggttacgttcagggtccggccaacagttctgatgcccttgtggaacgtgctggggtttgcactgggggcggggaccgccttgctcgggaaggaaggtgccatggcctgcaccgtggcggtggaagagagcatagcacatcactacaacaaccagatcaggacgctgatggaggaggaccctgaaaaatacgaggaacttcttcagctgataaagaaatttcgggatgaagagcttgagcaccatgacataggcctcgaccatgatgcagaattggctccagcctatgccgtcctgaagagcattatccaggccggatgcagagtggcgatatatttatcagaaagattataaagtgtgtccagttttgcctgtctataaaagatgatagtaatttaccaagtgacatttgcagagaaacaggtgtacagttatcgttgtacttttgtacaatgtgaattttgttaataaattataaggtttgtttttttttttttaaactctgcagtgttgatttttctctgggttgttttttctgccatgagaccaacaggtcaccagccttgttcaagttacagcaaacgaagctgggccttgtttggtctcatacttaattttcttttatatacatgtttttcttttacatgcatatatatatattttattttattttatgttttttggagacagggcctcgctcttttgtccaggccgggtcacaactcactgcagcctggacctcctagcctcaagcaatccacccacctcagccttccaagtagctgggactacaggtgtgcaccaccacagctggctaattctatttttttatagaggcgaagtctcactatgtcgccaggctggtctctaactcctgggctcagtgatcctcccgtttcgacttcccaaagtgctgggattacaggtgtgagccacttcaccaggcccattttctcctaaaacttcaaggacaaatcattaataatgtaacaggaatctttaggagaaaaaacaatttggtttactgataacaaaagataattggaaacatgagagtatttgagattggccaagcagaactatgaagtccatcaagtaagtcaaagatcatcgtttctgttttgaattgtgggtgataatgggtgggagagtgctacagtctgtatgtctgtgtctccctagaattcatacgatgaaatcttcactctcaagttgatagaaggtggggcccttgggaagtgtgaggtcatgagagtggagccctcatgaatgggatcagtgccttatgaaaggccctagagagatacctcatcctctccacagtgtgagacttcaaggggaagtatgagacttctctgaggaagcagacccttcacaagcaaaatcagccagcactttgatcacggacttcccagcctctaggactgtgagcaataaatgtttgatgtttataagccacccagactgtggtattttgttatagcagcctgaacagactaagacgggggtgttgcttccatcaaaggatgtactaagttgtggattatttgtgaaattgaattacaaccttttccttaaggtcttttaccacctcccccccaaaaaaatcccccaaaactgattcagattttcatactttaatgaaatattttataatttgcaaatttttaagtaatttatgaaaaacctagatcagtggatctcctctctggctgcccattagaatgtcctgtggagattaaacttttttttttcagtttatggaccaagagttttgatttatttagggtggagttcaggatcagaatggtttcagaagctcccaggtgattccggagtgagttggagctgcaagcccctgagctagattataagatgcttctgggaaagaaccacattttaggaatttgcttcccacccagtgccctgcatttaatcagcacctgatgacttggcaggacttgccccaccagggtctggctttgaagggtagtggacaccaggatcctttggattaatcctctgccacctctctcttttcctcaaccgagagtgaatttatgtaattgagtgaaagtctacgaatcataattgtaataaattaaggctgggcatttgtttgaaattagataggataaagccaaaggtttgaacaagttgtggatggtttgtaaaaattaatcttacaaaataaatgctgtgtgtgaacacgttgattaaattcaaaaaaa

SEQ ID NO: 220 - DNA, 1360 bp, Homo sapiens
atggggaaccgcagcaccgcggacgcggacgggctgctggctgggcgcgggccggccgcgggggcatctgcgggggcatctgcggggctggctgggcagggcgcggcggcgctggtggggggcgtgctgctcatcggcgcggtgctcgcggggaactcgctcgtgtgcgtgagcgtggccaccgagcgcgccctgcagacgcccaccaactccttcatcgtgagcctggcggccgccgacctcctcctcgctctcctggtgctgccgctcttcgtctactccgaggtccagggtggcgcgtggctgctgagcccccgcctgtgcgacgccctcatggccatggacgtcatgctgtgcaccgcctccatcttcaacctgtgcgccatcagcgtggacaggttcgtggccgtggccgtgccgctgcgctacaaccggcagggtgggagccgccggcagctgctgctcatcggcgccacgtggctgctgtccgcggcggtggcggcgcccgtactgtgcggcctcaacgacgtgcgcggccgcgaccccgccgtgtgccgcctggaggaccgcgactacgtggtctactcgtccgtgtgctccttcttcctaccctgcccgctcatgctgctgctctactgggccacgttccgcggcctgcagcgctgggaggtggcacgtcgcgccaagctgcacggccgcgcgccccgccgacccagcggccctggcccgccttcccccacgccacccgcgccccgcctcccccaggacccctgcggccccgactgtgcgccccccgcgcccggccttccccggggtccctgcggccccgactgtgcgcccgccgcgcccagcctcccccaggacccctgtggccccgactgtgcgccccccgcgcccggcctccccccggacccctgcggctccaactgtgctccccccgacgccgtcagagccgccgcgctcccaccccagactccaccgcagacccgcaggaggcggcgtgccaagatcaccggccgggagcgcaaggccatgagggtcctgccggtggtggtcggggccttcctgctgtgctggacgcccttcttcgtggtgcacatcacgcaggcgctgtgtcctgcctgctccgtgcccccgcggctggtcagcgccgtcacctggctgggctacgtcaacagcgccctcaaccccgtcatctacactgtcttcaacgccgagttccgcaacgtcttccgcaaggccctgcgtgcctgctgctgagccgggcacccccggacgccccccggcctgatggccaggcctcagggaccaaggagatggggagggcgcttttgtacgttaattaaacaaattccttccc

SEQ ID NO: 221 - DNA, 13109 bp, Homo sapiens
gggttcctcgcggcgatcccgactctcctcccgcggctgcagcagctgccggttgcacacggcctcggcggcggcgcggcgagcgcgggcctgtggagcggcggccgggcgcgcggccccggcgggcacccctcagagggcggccgaggaagctccgggaggaggagcaggaccacgaggaggtgggaggcggcggccgcctggggaccagctccgcgcctcggcctctccgccccctccccagcctttctctcgccctcttctcccacactcccggccggcgcctcggctttgtgcgaggagatggtgtagccccctggccgccgaaggaggagccggacacttgtctcccgtctccgagctgctccccacccctggaggagagacccccccctcggctcggcgccttctgcgtctcccggctggtggggaagcctctgcgccgccggcaccatgagtgaacagagtatctgtcaggcaagagctgctgtgatggtttatgatgatgccaataagaagtgggtgccagctggtggctcaactggattcagcagagttcatatctatcaccatacaggcaacaacacattcagagtggtgggcaggaagattcaggaccatcaggtcgtgataaactgtgccattcctaaagggttgaagtacaatcaagctacacagaccttccaccagtggcgagatgctagacaggtgtatggtctcaactttggcagcaaagaggatgccaatgtcttcgcaagtgccatgatgcatgccttagaagtgttaaattcacaggaaacagggccaacattgcctagacaaaactcacaactacctgctcaagttcaaaatggcccatcccaagaagaattggaaattcaaagaagacaactacaagaacagcaacggcaaaaggagctggagcgggaaaggctggagcgagaaagaatggaaagagaaaggttggagagagagaggttagaaagggaaaggctggagagggagcgactggaacaagaacagctggagagagagagacaagaacgggaacggcaggaacgcctggagcggcaggaacgcctggagcggcaggaacgcctggagcggcaggaacgcctggatcgggagaggcaagaaagacaagaacgagagaggctggagagactggaacgggagaggcaagaaagggagcgacaagagcagttagaaagggaacagctggaatgggagagagagcgcagaatatcaagtgctgctgcccctgcctctgttgagactcctctaaactctgtgctgggagactcttctgcttctgagccaggcttgcaggcagcctctcagccggccgagactccatcccaacagggcattgtcttgggaccacttgcacctccacctcctccaccactcccaccagggcctgcacaggcttcagtagccctccctcctcccccagggccccctccacctcctccactcccatccaccgggcctccaccgccccctcctccccctcctctccctaatcaagtaccccctcctcctccaccacctcctgccccacccctccctgcatctggattctttttggcatccatgtcagaagacaatcgccctttaactggacttgcagctgcaattgccggagcaaaacttaggaaagtgtcacggatggaggatacctctttcccaagtggagggaatgctattggtgtgaactccgcctcatctaaaacagatacaggccgtggaaatggaccccttcctttagggggtagtggtttaatggaagaaatgagtgccctgctggccaggaggagaagaattgctgaaaagggatcaacaatagaaacagaacaaaaagaggacaaaggtgaagattcagagcctgtaacttctaaggcctcttcaacaagtacacctgaaccaacaagaaaaccttgggaaagaacaaatacaatgaatggcagcaagtcacctgttatctccagaccaaaatccacacccttatcacagcccagtgccaatggagtccagacggaaggacttgactatgacaggctgaagcaggacattttagatgaaatgagaaaagaattaacaaagctaaaagaagagctcattgatgcaatcaggcaggaactgagcaagtcaaatactgcatagaggaacagactaaggagagataggactttaatctggaggaaaaatatcctacaaacaacaactgttcacaacagcaaacccctacatttatgagctgtaagaagaaaatggagacaaacagaaggagggaaaaaccaacctactctgaaagccttcagacattatgactctggtgataagctctttccctctccgtttgctgcttttttctggcctttacaacagaatggaagagaatcatttaagagttcctgtaacagttatgcagaaaatactaaaacccatcaggcaagatcaccacgcattgaaatattttcatatcaagataaagtcgcacattttccacaatacattgctaaaataaagaggagaaaggcttaggaagtttttttgcagagagtgctggtaaagaattgagcaagtttgctattgtattgtaatgtttctctcaggtttgttcttcctatcatgtttgatattccatgaataattgagatcagccctatgtaagttaagatcataatatgtggaacaaatggaattgtaagtgctttcaaagggtaatatttataagaaagtgtccgaaaaatgtttcttcagcttgagaaattttagaatgataggaagtttctcgagttagccttcatgcaattttgtagattaaaacataaaatttgtccagaacttaaagatttagatgccttcctaaattgttacaatgctttaccaaatctatgacttctacataacacaaaccagtggtcaaatgtaaacactatattgtagatttactgtaggttttcaaccttttttagatttatgcatgtggacatttttataatgtaattacaatcaccacaaggttagcttttttaattgcagacagtaatgcatgtcacactaatatgtagtggccttttcaaggcctagtcccagggaaaacattttgtagagtataggggagtgggaggaaggggaggaataattttttatttaaagttgatttctgcactatctttttctcagttacctgcatgaataaataatgagaaatattttgtgactttaattggtaaatatgttacaaaaccaagtacttaatcttttacatcatgtcttcagctatttgtattttaaccagtaatttcaatggtctgaaacatgattctgagcttcacataatatcttaactgtggaactcaaaagtttgatcactgaatttggcagttattattacctaggtacccccgctgttacacaggtgtttagatacgtgttcctgaatgaagctgcttttgaattttgttatgttgaaatgcaagaaataacaatgatggcagcaattaaggtcacagaaatcattaggtaaaggaaaaccaatgaggagttctgcagttttcttttaataagtaaagtgagacttgggtggtgggaagaaggaaggtgggaagaaggaattagacactctgcctgccactctgcgtgtgtgtgctctcgcgcacgtgctgtctatatggaagccactcccttttctttcctttgaaactggtaaggttaaaataggggagaaatcctacatgttggaatgatagctttttggaaaatttaagaaactctccaggctctccatcttgatttatgcttgagttgttatgtgccatatttgctttgaactctgattatcagaagttttactaaaactttgaaataattcactttcatctgctttctagattttgtacatctcagtccataaagcaaagcttgttgatagtgtagttttctaaacgctgcaaatttgcagcctttaccactacaaagaagtttggatgagggattttttttttctttgtcaaaatagttcctgtttctgtagaaatttcatttttagattaaactgtgatggatgagctatcataattcaagtatacatttcttttttctatcagatattcattgtcatgcagtagtagtaaaaacatcaaagatgcagcaagcttattaagtattattttctaaaagaaataggaggcattttcatctttattattgtacttttggttatgcaaacactttgataatataaacagttatgtcccctataaatctggtcagcaacctcttttgattttgttgggtaagttaaatagtctgtagtaggtagagtactgggtacaagtggtccaaactaagataagagactaaaataaaatgctaaatcttaaaagaaactgggtttatgcactaaacgttttgtgccttggtctaatattaacatgatgtatgtgtaaactgacaaaaaaaaaaaaaaaaaaaaaccagtgttgaatcatgctatatttcccatcatcccagattgctaaatgttctttccaagaagtctgaatgaattattatatacatttgctatcatacatgacagttgtgtcattattagagatttcagtaattaaaatgggaaacagaagcctaagttatttaccttatcaaaaccacgttccttggaaccacattattatgatggtttttgtgctcttgtacgttggatgtcttaagctgagtacagtttaggggatcctttctaatgacaggaaggcactgctttcctcaacactgtgatctgacctgtgacaagtctgtactatccactatgtaaatggctcacaagtcaattgcaaacaaactgaatgtacaaatcttagtgctggtgctgaaatctcttcagaatagtcatcatgatttaaaagtttgtttaaaaatttgcaagcatcaagtgtcaatcaaaactgaagatgaaacactaatgaatgttgaattctcatgcttttaggtgtacttcctttttagaattttcagttttctgctatttttaccgtaactatttcgtttaaatttgtttcatttaagtttcctacacgctaacttcgtttgtgcgattgaaataaaattgcagtatatatatgttgcttgtttgtgacacttagataatcttctgaaataatttgttttaaagtaagttatattggatgtgaaaaacaccttttaaagtccaagactttactacttaaaagtttacatgtcacgtcactattctttacagatttcatagaagtcgtgaatactaagtaatgtatacaaaagaaatatgtgatgatgtgtctactttttgtttgaaataactgttgggtgttccctcttcttattttctctctgcccaccttgacacagtaacttcctcttatagtcaagatgatgattaagtgtttaatttttattccattttgttctgcaacacgttcaggtacttaaaactcattcatgcagttagaattatcctttatgtagtttgcatggtaaaggacattgtgtggtaaagggcattattgagtaatgaattttaagtatagcaaaatatgtatagtgtttatacatgatgctgatttcttaaaacctacatataagcagtagtactttttctctattataaagtattaattttgagttccattttataattctgatgtcttcattagaaatacaaaaatacaatccttgtattttttctttgaccagacccaaattttccccttcccccctccattctcctctccacttctcgtggaccgcgtgttcccaatattcattaacatttgcagccattacagagttacagttgtaaaattttcagctgtttttttttttttttttttgctctagcctgtctcatgttcttgcttctcttcatatgtaagtcagtatttttgtctacaaattaaaagtcacttgtcattcaaaaatgagttaagtaacatgataatcttttaaatttacctagctacaacttttatgtctcttgtaaatttatatatactttcagtgccattgtgaagaattggccttttaattctaagtagtattaccctatgaagcacagtgtgcaaaggtatgctacaaggtctctttaattcctgtgtggccattataattttataacaccattaccctttaaattctaccgattataagcagcgtaaaagtaactatataaagcaaacatcgcaaaggaactctgcaggagctcttaattcctttatgtagctatcataaaattcactttcctgaagacatttactctcattcacttccaaactccaaacctttttctggtagcaccacttttgtttttaatagaaagatgagttcatatctgtacatctctccaaagctctaaggaatgagaaaaggatcctagtatattgaaattactgatgtttaatacctctgccttttcactaaaagccatttaatatttttaaagtcaaaacttgacatacaggtatttataaggaatctccatgactctgaaggaatgaaattgatgtaggtagctttggctatgtaaagacatagtagaggacaattacttaaagaagagttttcttttgaggatttgtagatttgactaagcagctgaagtcagtaacccctcaagaaagtccgtttatagaagccaagaactgttggaggtctgtgatgcaggtttttctgttcccaacatcaaaagctgtggattatttggtgtgttcccctttatgttatctctcgataatttttgagacatcaagattttttaaaatatcaatactggaaagatgaaaccttcaaattaaaacctaaaattgattagaaagaaaagtaaaatattaatgcagtaaatttaggatggttacagatactcaccatcaacataaataaatggagttctaggataaattatttgtggaatactaatggtcaagtcacataagagtaaaatcttttggtgaggagacacatttgacaactgctaaagaattaactaaatttgtctttctaaatagttttctttataaagtaacagaaacattgtaaaaggataaatgactgtcataatgacttaggatgttgtaagaatgtctgccacatttattggttatttctgttgaaatctgaaggaatcgatacatctgaaaattgagaaagggaaataggactgtccccgttacagatactctgtgatgcacacaaccttctaaacggaagtgttagtatcatttaaagcacatagtaggccttgagtatttgcagattaacatgcagaaaaaatcaaagatgaagccccaattaagtgtttgaaccaaagaatcacagtcactgagctgcacccccgttctgtgaagcatgttaaatactcataaagagcagagagcagggcccgtagacgcttctggtgtaggacacaggaattctaggcagagggagaaaattaggggccccagttggtggctgagagtaaaaagaatataccatttgagtagtgctgttctttttcctcagtttttaaagacatataattcctagtagttaggacatctaaatagctcggtaaactggtcagaggcgggaggattgcttgaggccagaagttttgagatcagcctgggtaacagggagactcatttctacaaaaaaatttaaaaatttaggccaggcatggtggtgcacacctgtaatcccagctactcaggagactgaagcgggaggatcacctgagcccagggaggacgcggctgcagtgagccgttatcatgccactgtactccagcctgggtgacagagcgagaacctgtctctaaaaaaaaaaaaaaaaaattctaagagaatatagcttttcatagaaattattagaaaagcttacatatttcattagagagcccagtttgttagactacatttattccgtaaaagttctatatacaaatgacaacccatagtttatcatgtaaatctgatttaactgttcccttcaattccaagaaagatttcttcagcagtagatgacaattctaaaagcataaagaaataactaataaaggagatggatgatgttataggttggtttggttgggttttagtaaatagttattcttctaagaaggcttagaaaatcgagaattgaatagttggtactttgaattccataggaaaaagcactcagaagaaaaagtctacattggctagtgtttagattgagagttaattttcccatcaagtccaaaagtttccatccaagtctatagaaactgagagaaaaggttcttggcttacacttaaaatacacattgttgcaaccatataagagagatacattacagaacgcttttaaaaatttggtctcttaagcgcctaacagtccatgctttagtcacatctgtgaaacctcttttctttttttctttttcttttatttttttttttaaagattaaaggcattttaaaaataaatgtttcatggccgggcatggtggctcacgcctgtaatcccagcactttgggaggctgaggtgggcagatcacctgaggtcaggagtttgagaccagcctggccaacatgatgaaaccccatctctactaaaaatacaaaaaaattggctgggcatagtggtgggcacctgtaatcccagctcttcgggaggctgagacagaagagtcgcttgaatccaggaggtggaggttgcagtgagctaagaccgcgccactgtactccagcctgggcgacagagcgagattccatctctaaataaataaatgtttttcaacgtgttttatgtgagaaataccagcttttcattattactaccagttgatctcaggtgtcacttggttggttctgctgaccgaggcactgggcattttaaatatggagtttccctccacccattgatcaagtctgaggtttgtccatccttggtggcaggctagcttaaccatggattcacaaaccccatttgattgtcgtaagtcataaggccaccccagtgccagtggttgggcatcacagtgagtctgaggtgatgaatttgagttagctgtaggctagttccgcaactcagcaatagcccatggatggttggtaaaagacgttgactttgccacttaaatttccaggagaagaatagcttatagtttatctgaggaaagtaattgggaaggcttagatattgagaagaaagccctgttaaaatctaggtagcatttcctttcttctttattactagagggatgggaggttcaggcctgagtcaggactttacaatttggtgtccttcccagaggtactttgggcttgatcattttaagtttcaattgcaaaaaaaaatttttgacggagtgttgctctgtcactcaggttggagtgcagtggtgcgatctcggctcactgcaacttcccccccctgggttcaaagggattttcctgcctcagcctcccaagtagctgggactacaggcgcgtgccaccatgcccgactaatttttgtatttttagtagagatggggtttcaccatgttgcccaggctggtcttgaactcctgagctcaggtgatctgcccgcctcggccttcaattgcagaagtttttgaagggagaatatttgatcctcacataaaatgtccttgtttctgaaagaaaacatggtaaaaattgttattgagtccatgtctttgccaccttgttggacttgatttccctttctctgtgttcctcccgccctcagtctctctcagtctgtccttttttgtgtgtggagttgtgggcaggtcattggactgggactgactttaccagttttcaggctgtggggctagtcagtcattctctctgagccttctacctctaaagttgagttctttttttaaattctttttgttttgtttttattttttccttgccactatacaagcaaggatagataaagctttttattattattgttattattattatttcgagacagtctcgctctgtcatccaggctggagtgcagtggtgtgatttcagctcactgcaacctctgcctcccgggttcaagcgattctcctacctcagcctccttagtagctgggactacaggcatgcgccaccacacccggctaatttttgtatttttagtagagacagggtttcaccgtattggccaggctggtctcgaactcctgacctcaggtgatccacccaccttggcctcccaaagtgttgggattacaggcataagcgaccgtgcccatccccgataaagttgagttctgaatttcctctttcactgtattctcggcagctactggttggtttattctttttttttaatcttttttggtttattcttcttttgatctttgaagagaaggagaaaaaagatctgagtttggctctcccatcttaagtgcagcttttagttgttttatagtcatagacgctattgcactggacagcatgcatcctggatgtaaacaatgcggaaaaatcaatggagtgaccatcttggggtcagtggtgttgcataaagcaccagtggtgtgctgttctgtgtcagtttcctctgcgccacgtgctttcacagtttgaattaccagcatctctgtggtggcttcagtacattctccattgtgcttcaacctggaagcacattctgccgttcagaaagactgattccaatcatgtaatgggaccacacgagatccatgctccaattatatgaatagcagaaggtccatttgactcttgtagttcaagagctgtttctaagtaaacagactttccagagctcgatgaagtgaagaagcccttctttcaattcctgggcagaattcagtggttttcatatcatctgaacctgctgtgctgctgtttattctatcactgtcagccttgaaaggaaaaaaggaataatcttaccctcctgcccttcttattttatatcttccatcttatccatctatatccatgtagtcattccttccgagttccctggttttaatccaaaagactctgtttaacagcaatgtcttggcagaccaggtgccgcttccgtgccatttgagggctctgagtctttgcttcgtcttaggaagataaagataatttggcagaaagtcagagatggaaatagcagtttgggatgataaaagatgggtcctgttttgctgacattcttttactttggttcttggtgcgtgtcctttgggattcatttcttgctagcatgaataggacatgcttttcgttaggtgcttttcttttttggagaacatgaagtgtttctaacaaaactgaatgagctagaaagaattctattttgagacatctgtagttgatgcaaagtatttctgtaatcctcaatgacagtacttacatatttgcatagaattttttttttaatttttgaggaaacctctctggagtctgtatttataggagcatcctgaaagtccctattatgtagctggtgggagcgagagagggacagccacactcgtgctgtgagcagagcacaacttcaggcagagtgaatgccttctgagttctcattggaagctttctgttgctcagcctctggcagatttcagaaccttctacttaagccaggtgtggtggtgcgtgctcctaggcacagcgactcggggggctgaggcagaaggatcacttgagcccaaagttggaggccagcctgggcaacatagcgaggcctgtctccttaaaaaataaataaataaataataaataaataaataaataaaaaccttgtccttgactattgtgctgtctgctgcccctttgtagggatggggttggggtcagaataagcatgtgcatgaatggcggaaagctttggtggtgtttgtttgtttgtttgttttttgagaggtgggggagtcagcagtgaacctttctggttaaagaacaacgtacataatttctattatgagatttagaaggttaaatacttttttttttcaggcctaccaagttgatagaccaaaagtatatagtagaacagcacagtagaaaaaatttaaaagtgaatttcttatggtccaaaaggatggatagtcacagtccataacctttcataatatatgctggaattggaatctcttgtcatcttgctttgctctgaattttagaactagaagtgtgcatgtatgtcaaaagattatgcagagctattttctttgctaacaatgtaaacatttgcaccccatgaatgggactttataatctggaagtgagcctaaggttgcgtatactgaagtcatgttttaaaagttaaggttgacttaaacatatacaaggctgtattttaattgtaactagaaatcatttactatgcatacagaacctcatgtatcttatcatggaatttgtgaattaatgggccttgccgaattcaagggtaagggaaactggtaacaacttgttttaaatcaacatactataagctcctgcttgcttgactcaagttgtttgaaaatctgaattaaacaggatctcattgtcaggaaacatcttctaagcttgacatctacgtttaagaagggaacgtggaagagaaggtgagacatgaaactaaaacagctgggagggtaggatcagactgcacctgatttttggaccaaagtttcatataggaataaataaaaaggaggaccacttgtgagccaacctaggaaggacttgccagaaagtagcagctcctgctgcaaaatacagtgccttcaaaatgattctctgtgtgaattgcatgcaatttcatgtaaccataaagtgtaacctgtatgtgcatgacatgtgtctagaatgtgtaaagttaggattcagcaggaaggggcctggccctgtcactgtggtggatcagtggacctgctgaagtcactggactcatgtgacttaggtttgcagcatcagacccctgtgtttgcattaagtggccacatcgttgaaatcggatcaatctctccctcagctttctttcctactttgcagctttgctggttttaactgcttcattcttctgcttcttggtatccttttttcttttgaaataaaaacatgaaatacttaattc

SEQ ID NO: 222 - DNA, 436 bp, Homo sapiens
gcagctactgaactggaattgagaacaaaagagcagttattgaaaaagtaatattacaatcttttaaaatagggaatatacttgtgtgctaatgggagaagtcattagtaaatatttaactagcccaaatagctcacttaatataattccacaaaaaaatgaattactttattgtagaagcctgtaaggctaaattataggtagtgttacaagtttccgttagctagtcaaaaactggcattaattttacatttcctaagaatgagaactttcaagtcataaaaatacgaaactcctagagcctgtaaaataatccacttaatacaactgatgacgtgctaaatattaaactactaggttctgaatgtaaaccattatcttcctgcttttaaaaaaactaacccaagttttgctgcacttaagcattaagacttct

SEQ ID NO: 223 - DNA, 2776 bp, Homo sapiens
cagccgccgagcggccgcgatttcccggggactgctggggcgcagcggggaggcgggccggggggcggcggggcgcgagcagagcgcggttgacctccctttctctgctcagctccagcgtcatttcggcctcttagttcttctgaaccctgctcctgagctaggtaggaaacatgagcggcaccaacttggatgggaacgatgagtttgatgagcagttgcgaatgcaagaattgtacggagacggcaaggatggtgacacccagaccgatgccggcggagaacccgattctctcgggcagcagccgacggacactccctacgagtgggacctggacaaaaaggcttggttccccaagattactgaagatttcattgctacatatcaggccaattatggcttctctaacgatggcgcatctagttctaccgcaaatgttgaagatgtccatgctaggactgcagaggaacctccacaagaaaaagccccggaacccactgatgccagaaagaagggagaaaaaagaaaggctgagtcaggatggtttcatgttgaagaagacagaaatacaaatgtatacgtgtctggtttgcctccagatattacagtggatgaatttatacaacttatgtccaagtttggcattattatgagagatcctcagacagaagaatttaaggtcaaactttacaaagataatcaaggaaatcttaaaggagacggtctttgctgttatttgaaaagagaatctgtggaacttgcattaaaacttttggatgaagatgaaattagaggctacaaattacatgttgaggtggcaaagtttcaactgaagggagaatatgatgcctcaaagaagaagaagaagtgcaaagactataagaagaagctgtctatgcaacaaaagcagttggattggagacctgagaggcgagccggaccatcccggatgcgccatgagcgagttgtcatcatcaagaatatgtttcatcctatggattttgaggatgatccgttggtgctgaatgagatcagagaagaccttcgagtagagtgttcgaagtttggacaaattaggaaactccttctctttgataggcacccagatggtgtggcctctgtgtcctttcgggatccagaggaagctgattattgtattcagactctcgatggaagatggtttggtggccgtcaaatcactgcccaggcatgggatgggactacagattatcaggtggaggaaacctcaagagaaagggaggaaaggctgagaggatgggaggctttcctcaatgctcctgaggccaacagaggccttaggcgttcagattctgtctctgcttccgaaagggcagggccttctagagcaaggcatttttcagagcaccccagcacatctaaaatgaatgctcaagaaactgcaactggaatggcgtttgaagaacctatagatgagaagaagtttgaaaagacagaagatgggggagaatttgaagaaggtgcttctgaaaacaatgctaaggaaagtagccccgaaaaagaggctgaagaaggctgccctgaaaaagaatctgaagagggctgccccaaaagagggtttgaaggcagctgctcccaaaaagagtctgaagaaggcaatcccgtaagaggatctgaagaggatagtcctaaaaaagagtctaaaaagaagacactcaaaaatgattgtgaagagaatggccttgcaaaggaatctgaagatgacctcaacaaggagtctgaagaggaggttggccccacaaaagagtccgaagaagatgactcagagaaagagtctgatgaagactgctctgaaaaacagtctgaagatggctccgaaagagaatttgaagaaaatggtctcgagaaagatttggacgaggaaggttctgaaaaggagcttcatgaaaatgttcttgacaaagagttagaagaaaatgactctgaaaactccgaatttgaagatgacggctctgaaaaagtgttagatgaggaaggctctgagagagagtttgacgaagattcagatgaaaaggaagaagaggaggatacatatgaaaaagtatttgatgatgagtctgatgagaaagaggatgaagaatatgcagatgaaaaggggcttgaagctgctgataaaaaggcggaagaaggtgatgcagatgaaaagctgtttgaagagtcagatgacaaggaagatgaagatgcagatggaaaggaagttgaagatgctgacgaaaagttgttcgaagatgatgattccaatgagaagttgtttgatgaggaggaagattccagtgagaagttgtttgacgattctgatgagagggggactttgggtggttttgggagtgttgaagaagggcccctatccactggcagcagctttattctcagtagcgatgatgatgacgatgatatttaatcccttaaacttgctttttagggagagtcctccatctacatttgcctgtgcttcagggtaattactagtagtgttacatgaacatgtgcatagtggtaggatgccatcagattaaagcattgaagtgtttcattgttacctgtacctaatggttttaaatatatgttaattgattgtttagttaaaatgtcatagttacaatgcaagtaaactggatacttgttcttttgtcagatttgttaaatgcatgcagaataatatttttaagagtattgattgaagtttgtgatattcatcaataaaaatgagttgataataaaaaaaaaaaaaaaaaa

SEQ ID NO: 224 - DNA, 2389 bp, Homo sapiens
aggcgcggttgtgagtagtaccgggagtggggtgatcccgggctaggggagcgcggcggccgcgatcgggcttagtcggagctccgaagggagtgactaggacacccgggtgggctacttttcttccggtgcttttgctttttttttcctttgggctcgggctgagtgtcgcccactgagcaaagattccctcgtaaaacccagagcgaccctcccgtcaattgttgggctcgggagtgtcgcggtgccccgagcgcgccgggcgcggaggcaaagggagcggagccggccgcggacggggcccggagcttgcctgcctccctcgctcgccccagcgggttcgctcgcgtagagcgcagggcgcgcgcgatgaaggcggtgagcccggtgcgcccctcgggccgcaaggcgccgtcgggctgcggcggcggggagctggcgctgcgctgcctggccgagcacggccacagcctgggtggctccgcagccgcggcggcggcggcggcggcagcgcgctgtaaggcggccgaggcggcggccgacgagccggcgctgtgcctgcagtgcgatatgaacgactgctatagccgcctgcggaggctggtgcccaccatcccgcccaacaagaaagtcagcaaagtggagatcctgcagcacgttatcgactacatcctggacctgcagctggcgctggagacgcacccggccctgctgaggcagccaccaccgcccgcgccgccacaccacccggccgggacctgtccagccgcgccgccgcggaccccgctcactgcgctcaacaccgacccggccggcgcggtgaacaagcagggcgacagcattctgtgccgctgagccgcgctgtccaggtgtgcggccgcctgagcccgagccaggagcactagagagggagggggaagagcagaagttagagaaaaaaagccaccggaggaaaggaaaaaacatcggccaacctagaaacgttttcattcgtcattccaagagagagagaggaaagaaaaatacaactttcattctttctttgcacgttcataaacattctacatacgtattctcttttgtctcttcatttataactgctgtgaattgtacatttctgtgttttttggaggtgcagttaaacttttaagcttaagtgtgacaggactgataaatagaagatcaagagtagatccgactttagaagcctactttgtgaccaaggagctcaatttttgttttgaagctttactaatctaccagagcattgtagatattttttttttacatctattgtttaaaatagatgattataacggggcagagaactttcttttctctgcaagaatgttacatattgtatagataaatgagtgacatttcataccatgtatatatagagatgttctataagtgtgagaaagtatatgctttaatagatactgtaattataagatatttttaattaaatatttttttgtaaatattatgtgtgtgtttttttttaatctatgggaatatttcttttggaaaatcatttttcagctcaattacagagctcttgatatcttgaatgtcttttctgtttggcctggctcttaatttgcttttgttttgcccagtatagactcggaagtaacagttatagctagtggtcttgcatgattgcatgagatgtttaatcacaaattaaacttgttctgagtccattcaaatgtgtttttttaaatgtagattgaaatctttgtatttgaagcatacatgttgaaaatacaccttatcagtttttaagtacagggttttatagtgtaatatatacagagtaagtgtttgtttttgtttttcaactgaggtcaaaatggattctgaatgattttgcatatgggatgaggaaatgcttggatccttaaggagtttacgaaatctgctgttttatcaaagtgaaaaaaaattgcttattactcttcattttacactaaagcttaatgtcactaagtttcatgtctgtacagattatttaaatcatggaaatgaaaaaaatgttctctgcttgctaccaaaggacaaactcttggaaatgaacactttctgctttccttcctccaaagaattaataggcaacagtgggagaaaaaaaaggcataatggcaaatccttcaagcagggataaaagtcgatcttcaaacattaacttaagcagaccaaaaattctgatgaccgcatctagattatttttttataaaaatgattttcactatagctatgttacgctaagctactgtcccatctcttgtgatgtgtaacttttacatgtgaatattaaagtagatttctctgtcttgtaaaaaaaaaaaaaaaaaaaaaaaaaaaaaaaaaaaaaaaaaaaaaa

SEQ ID NO: 225 - DNA, 1402 bp, Homo sapiens
cgacagagagagcgagcctgtgtccaaaaagtaagtaagtaaataaatacataaaaataaatacgggtttctgtcacctcgcttcagaatcagacagctagaggtggggcctggaattggtgttgttaatgcattctccaggaatttctcctgcatagggaagttggaaaccactggcttccttctctctgagcatctcctgagactagctcctgaagtggatagaaagtttttcaagtagcagattaagttttatcccttaggctgctaataaaaaacaattgactgtgattgcgtaattttacctgtcgtacacctttcagaaggcagaggctttggttcacccctctacctccagggcctaaaacagtgcctggaggaactcaattaaacatttgttgagtgaatacgtgaattacattgcagcgaggccaatcttttaaaagttacttgtcaaattaatctatcagttagtggcatattaaagcccagcatattacaaaaaaaatttttttagtagtcactgattttataaattaggagccacaagcactataccccagtgacttctgtaagtttggttagtttagaaaggagagagcctttcccagggcgtagtgtgctcaaggtgattagccagaaagaagattcagaacaaagcatttgcttagagagtcaaatgtaattagtcacagtgtagtggtaaatcatatatcaaacttatatttggtatattgtcttatatcaaaatatcattttataaaccataagtccaacatactgctataaaaattggtttctagcaaatagagaaaattgttatgttttccaatttcacttttcatactaataaaatttgacctttacaccttctttttcaagagttcaccacaggggcaccatagatattatgtagttaagagctcaaactctggagaatattgtgtttgaccacacatagtcagggagtttgatctaacctctcaatgcctcatttctcagctgaacatggaaatagtaataataaagttcacatacttctaagtgcttacctaagtttttgagacacatccacttaataaatggtagttacagtgatgataaagaattggggtgtataaaaatacctaaaactcaaaagctaacccatttaattattgtactactggacttttatgatagtaagtagaaatctgttgcttaaaaaagaagtttctttggtggtgtgcgtctatagtcccagctacttcggaggctgaggtgggagaatcacttgaacccaggagatcttggctgcagtgagctatgattgtgccactgcactctagcctgggtgacagagcaaggccctgtctcaaaaaaaaaaaaaaaaaaaaaaaaaaaaaaaaaaaaaaaaaaaaaa

SEQ ID NO: 226 - DNA, 432 bp, Homo sapiens
gctacatatggataggcagagagaggggtctgcttcttgtccagctgtagctctgtgctagtggaagcatgtcctggagttcacgatgtggccaagagaacagatgtagttaggcaatggaggtgggacagagagctgcaaagtgctgcacttgcccctcttactggacccaaaaggctctcaagtgtaacacctttctgtagtgctgtagatcattaatctgggtgtgtgatgaccatctgatctagcacatccagtggcattgtgcatattgggataggaatttgattttgtgaactcaagctattcagcagggcccatgaaaaatcaccagaagggtaggtgggtctttgccactgtctgatgtttcaaagatttcttgtattaaatgctgtgtccaaaattatagaatactctccagtttgtatttat

SEQ ID NO: 227 - DNA, 4949 bp, Homo sapiens
cagccgccggcggcgctagcacctcggagtcgggcggccggagcagcggagcgcagcgcggcgcagggaacggcactgggggtggggagaccagcccggccgagccgagggccaccccctggtcctctgccctcgcgccccgctagggccaggtgcacaaaaagctttaaacaagttaaaatctaggcaacagactccctgaagtgttgactgcccaacttaatcatgactgtgattcaaaaatgttaataaataaaccaaggtgtagatcatggggaattcatatgctgggcaactgaaatctgctcgatttgaggaagctctccacaactccatagaagcctccctcagatgtagtagtgtggtaccacggccaattttttcccagctatacctggaccctgaccagcatcctttctcatctgcagatgtcaaacccaaggtggaggatctggacaaagatttggtaaaccgctacactcaaaatggaagtctggatttttctaacaatctaacagttaatgaaatggaagatgatgaagacgatgaagaaatgtctgattcaaacagcccaccaattccctattcacaaaaacctgccccagaaggatcttgcactacagatggtttttgtcaagcaggaaaggatttgcgtttggtatcactgtgtatggaacaaattgacatcccagcaggattcctcctggtgggggccaagtctcccaatctgcctgaacacatcctagtttgtgctgtggacaagcgatttctaccagatgatcatggaaaaaatgcacttttagggttttctggaaattgtatcggctgtggagaaagaggatttcgatatttcacggaattttccaaccacattaacttgaagctcaccactcagccaaagaagcagaagcacttaaagtactacctagtcagaagctcccagggtgtactgtctaaaggacctcttatctgctggaaagaatgtagaagccgacaatcctctgcttcttgccactctattaagccaagctcttcagtgtcgtcaactgtgaccccagaaaatgggacaactaatggatacaaatcaggattcactcagacagatgctgctaatggaaacagtagccatggagggaagggcagtgcatccagctccactccagcccacacagggaattactctttgtcaccacgacctagctatgcatcaggagatcaagctaccatgttcatttctgggccaccaaagaaacgacaccggggatggtatcctgggtcacctctcccccaacctggcttagttgtacctgtccctacagttcgccctctttcaagaacggagccccttttatctgccccagttccacagaccccactaactggaattttacaacccaggcccattcctgcaggggaaactgtaattgttcctgaaaacctgctgagtaactcaggagttagaccagtaattctgataggctatggcactttaccctatttctatggaaatgttggtgacattgttgtgagtcctctgctggtgaattgctacaagattccacagttggaaaacaaagatttggaaaaattagggttgaccggcagccaatttctgagcgtggaaaacatgattcttctgacgatacagtatcttgtgcggctgggtcctgatcaggtacctctcagggaagaatttgagcaaattatgctgaaagctatgcaagaatttactctgagagaaagagccctgcagataggtgctcagtgtgtccctgtgtcaccaggacaactcccctggcttgctagattaattgccagcgtatctcaagacttggttcatgtggttgtgacccagaactctttggcggagggcatttcagagaccttaaggactctcagtgaaatgagacactatcaaaggctgccagattatgtggtggtaatttgtgcatcgaaaatcagaggaaatgaattttgtgtggtagtgttaggtcagcaccagtcccgagctctggcagagagcatgctcaccacaagtgagtttttgaaagaaattagttatgagcttatcacaggaaaggtcagtttcctggcatcacatttcaaaaccacatcattaggcgatgacctagacaagctgctggaaaaaatgcaacaaagaagaggagacagtgtggttacccctttcgatggagaccttaatgaatgtgtgtcaccccaggaggctgctgctatgattcccacacaaaacctggatttagataatgaaaccttccacatttatcaaccgcagctaacagttgccagaaaactcttatcccaggtgtgtgctatagcggacagtggcagccagagcctggacctcggtcacttcagcaaagtagacttcatcatcattgttcccagatcggaggtgttggttcagcaaactcttcagcggattcgacaatcagtgtcatttcaggctctttgtcacatagcgaacccagtcatgggctagctgatagagtcattaattgcagagaagttctggaagctttcaacctcctggtgctccaggtcagctccttcccatacactctgcagacccaacagtcccgcattagctctagcaatgaggttcactggatacagctggatactggggaggacgtgggctgcgaggagaagctgtactttggcttgagtgagtacagcaagtctctgcagtgggggatcacgagcccacttctgagatgtgacgagacttttgaaaaaatggtgaacacactcttggagaggtaccccaggctgcacagcatggtcgtccgctgctatcttctcatccagcagtactctgaggccctgatggctctcaccaccatggcgtcactccgcgaccacagcacaccagaaacactcagcattatggatgacctcatcagctccccaggcaaaaacaaaagtgggaggggacacatgctcattatcagggtgccctcggtgcagctggcgatgttagccaaggagcggctacaggaggtgcgcgacaaactgggtctgcagtatcggtttgagatcatccttgggaacccggccaccgaactcagtgttgcaactcactttgtggcgcgattaaagagttggagaggaaatgaaccagaagagtggatccctcggacataccaagatttagacggtctaccttgtattgtgatattaactggcaaagatcctcttggagaaacctttcccaggtctttgaagtactgtgacctccggttaattgactcaagctatttaactcgcacggccttggagcaggaggtgggtctggcatgctgctatgtctcaaaagaggtcatccggggacccactgttgccctggacctcagcgggaaggagcaggagagagctgctgtcagtgagaatgactccgatgagctgctcatcgacctggagcggccccagagcaacagcagcgctgtcacagggacctcgggttccatcatggagaatggagtgagctcttccagcacagctgacaagtcccagaagcagtccctgacccccagctttcagagcccagccaccagcttggggctggatgaaggggtctccgccagctcagctggagccggagccggggagactctgaagcaggagtgtgactccctgggcccccagatggcgagcagcaccacctccaagccgtcatcatcatcctcaggacccaggaccctcccatggccgggacagcccatcagaggctgccggggcccacaggcagccctgccaccagtggtgatcctatccaaagcggcctacagtctcctgggctcccagaagagtggcaagctgccatcctcctcctccctgctgccccacgccgacgtggcctgggtgagctccctgcggccactcctgaacaaggacatgagcagtgaggagcagtccctctactacaggcagtggaccttggcccggcagcaccacgctgactatagcaaccagctggacccggcctctggcacccgaaacttccacccccgacggctcctgctgacagggcccccacaggtgggaaagacgggctcctatttacagttcctcaggatcctcttccgcatgctcatcaggctcctggaggtggacgtgtatgatgaggaggagatcaacaccgatcacaatgaaagcagtgaagtgagccagtcagagggagagccctggcctgacatcgagagcttcagtaaaatgccttttgatgtcagtgtgcatgaccccaagtacagtttgatgagcctggtgtatactgagaagctggcaggggtcaaacaagaagtgataaaggaatccaaagttgaagagcccaggaaacgggaaactgtatccataatgctgaccaaatatgcagcctataacacctttcaccactgtgaacagtgccgccagtacatggacttcacctctgcctcccagatgtctgactccacccttcatgccttcacattctcttcttctatgctgggagaagaggttcagctctatttcatcattcccaaatccaaagagagtcattttgtcttcagcaagcagggcaagcacctggagagcatgcggctgcccctggtttcagacaagaatttgaatgcagtcaagagccctattttcactccttccagtggtcgacatgagcacggactcctaaaccttttccacgccatggagggcatcagccaccttcacctcctggtggtcaaagagtatgagatgcctctgtaccgcaagtactggcccaaccacatcatgctggtgcttcccggcatgttcaataatgcaggcgtgggtaaggggcccccctgggatggggagaagggcttcgaagataaactgagctccattcccctggcatgaaactttcagattcccctgcctctagaaattgtcctgccctcctcaccactcttcgg

SEQ ID NO: 228 - DNA, 9308 bp, Homo sapiens
atgagtaactcccggaataaccgggtgatggtggaaggggttggcgctcgggtagtgcgcggcccggactggaagtgggggaagcaggacggcggcgagggccatgtgggcaccgtccggagcttcgagagccccgaggaggtggtggtagtgtgggacaacggcacagctgccaactaccgctgctccggggcttacgacctccgcatcctggacagcgcgcccaccggcatcaagcatgatggaaccatgtgtgatacctgccgccagcaaccaatcattggcattcgatggaagtgtgcagagtgtacaaattatgatttgtgcacagtgtgttatcatggagataaacatcatttaagacatcgcttttaccgaattactacaccgggaagtgagagggttctgttagagtctcgtaggaaatctaagaagattacagccagaggaatctttgcaggtgccagagtggtgcgaggagtggactggcagtgggaagatcaagatggaggaaatggacgtaggggaaaggtaacagaaatccaggactggagtgcatcaagcccacatagcgcagcatatgtcctctgggataatggtgctaagaacctttacagagttggctttgagggcatgtctgatctgaaatgtgtccaggatgccaagggaggttctttctacagagatcactgccctgtgctaggtgagcagaatggcaacaggaatcctggtggattgcagattggtgacctggtaaatatagatctcgacctcgaaattgtacagtctttgcagcatggtcatggaggatggactgatggaatgtttgagactttaactacaactggaactgtttgtggcattgatgaagatcatgacattgtagtacagtatccaagtggcaataggtggaccttcaatcctgctgttctcactaaagcgaacattgtccgaagtggagatgctgctcagggtgcagaaggaggcacctcgcagtttcaagtgggtgatcttgtacaagtttgttatgacctggaacgaattaaacttctacaaagaggacatggagaatgggctgaagcgatgcttccaactttaggtaaagttggccgagtacaacagatttattcagacagtgatttaaaggtggaagtttgtggaacatcttggacatacaatccagcagcagtttccaaggtggcatctgcaggatcagccattagcaatgcatctggtgaaagactctcacaactcctgaagaaattatttgaaacccaagaatctggtgacctcaatgaagaattagttaaggctgctgccaatggagatgttgctaaagtggaagatttgcttaaaagaccagatgtggatgtaaatgggcaatgtgctggccacacagctatgcaagctgctagtcagaatggacatgttgacattttgaagttacttttgaagcaaaacgtggatgtcgaagcagaggataaagatggtgatagagcagttcaccatgcagcttttggagatgaaggcgctgttatagaagtactacatcgaggtagtgctgatttgaatgctcgaaacaagcgccgacagacaccacttcatattgctgtcaataaaggtcatcttcaagttgtgaagactttattggactttggctgtcatcccagtctccaggattctgaaggtgatacccctcttcatgatgcaataagtaagaaacgtgatgatatcctagcagttcttttggaagctggagcagatgttaccatcacaaacaataatggatttaatgctctgcatcatgctgcactaaggggaaatcccagtgcaatgcgtgttttactatctaaattaccaagaccatggattgtggatgagaagaaagatgatggttatactgccttacatctggctgcccttaataatcacgtagaagtggctgaactgttggtacatcagggtaatgcaaacctggatatccagaatgtgaaccaacaaactgccctacaccttgctgttgaacgacagcatacccagattgttaggcttttggtccgtgcaggtgccaagcttgatattcaggataaggatggggatactcctttgcatgaagctctaaggcatcacactttgtctcagctacgtcagctccaagatatgcaagatgtggggaaggtggatgctgcctgggagccatccaaaaacacgttaataatgggacttggtacccagggggcagagaagaagagtgcagcatctattgcctgtttcttggcagccaatggtgctgacctgagcattcgaaataagaagggtcaatcgccacttgatctctgtcctgatccgaatctctgcaaagcactggcaaagtgtcataaggaaaaagtcagtggtcaagtgggttctcggagtccttctatgattagtaatgattctgaaaccttagaagagtgtatggtgtgctcagatatgaagagagatactctttttggtccatgtggacatattgctacctgttctttatgttctccacgtgtcaagaaatgcctcatctgtaaagaacaggttcaatccaggacaaagattgaagaatgtgtggtatgctctgacaagaaagcagctgttctttttcaaccctgtggccacatgtgtgcttgtgagaactgtgctaacctgatgaaaaagtgtgtgcagtgtcgagcagtagttgaacgaagagtgcctttcattatgtgctgtggagggaaaagttcagaagatgccactgatgatatctcaagtgggaatattccagtattacaaaaggacaaggataataccaatgtcaatgcagatgtgcaaaagttgcagcaacagttacaagacattaaagagcagacaatgtgccctgtgtgtctagatcgtctgaagaatatgattttcctttgtggtcacggaacctgtcaactctgtggagaccgcatgagtgaatgtcctatctgtcgcaaggctattgaacgaaggattcttttgtattaactaagacacatggtgtattttgttagctaatgtatctagtcatgagatcttaataggcttttgatctagttggaagttctgatgagttaatttctaatatcatagtttctttactagagtataattgggctgtaaatgtaccagaacaaaaaaccctacaaaatggtgttggaaattgtgttttttgtttttgttttaaatttgaaacatcaaattcatgtaactcataggataatttacctttggcttctaagaggaaagtcctttaaggatatccttttttaaaaaattgcatttttctcttataatttgtaaatttgttggatctcaaaagacataattctttgtgatcagttatccttcatttcatcgtggttttacacagtgagttgataacaggttctctgagaagtcatgcatcaaataaaagaggcaggtcaaacaattatgtcacatggtaaattataaaatgacagtacaagttccagatagttaagggaataccgaagggatgattctttttttaagataacaggaagttacccacatgtttgtttctgaattcttagagtaaatggaagcatagaatgagggaataatgactttgcatttctcttgttttctagattcaaaaggaacattgtttaacttgaatcagattaccagtttcaaggtgactgatagacaagaaaaggaaaaataagcaataatagtgggcaactgaagagaaaaaaaaaacgagtatctattaactggccactaacagttgcctttcttacattaatttatacactattttgttcagccagtgtttttaaaaaaaatctatgaaaagtgtacttccggttttctgtgattacttatctgggcttgatctgaccagtgaaatgacattgccctatttggacctctgaggttctatttagctttgcagatgtacatagtatcccagtgatctgcaaaattaatgccttttccaagaaaaaatcttttcttctctgtatcagttaattctgacagtgttagtgattctgtcttcattataggccttatttccattatctctttctttatagtattttttgttataaagaaaacagtctttctgtgtatacctacggatgagggtattatttaaactgccaacaatatccaagacatggtcaataacctaattataaatactttagaaagagtgaccaggacatgtatagaaatgtctgcttacctgtagactttaaaaacaaacaaaatttttggagcatttaatcattttttttctccttttatctcctttgtaatcttattgtctcctgagtaaatatacacataaatgtttggggattcattgctgctagattatatcaggtgtttacatagtgtctactatatgctgttgataagctttttcctaaaaatagttatcctcttttgtagtttttttccctcctttaaatctggctagcttttcttacttcagtttttatagaacaccaactaaatttgaaagtatgaagtctctagccctcttacactgtttctggctgtttaatccttgctgcctttgcaagtcctggtgaaagcaatggggagctttgctggctggttttgtagtctcaacaattccatgtctgtgtttagctgagtaactgctatcatttagaacagtaaaatttttatagatttcaaatttgaaaattcatgtacactcagttatctaataaggggccaccgacgctgtttttaaaactattttgaagttataaaaaggtagaacatctgactgatgatgttcacataaagagacagacagactatcatgttgcagacatgaaaacagcatgtcaggtttttcctttccttccatgccatgggctacccatctcttcccactagatcacctggtgaggagggagcacctggctgactcatgcagagtttggccaatcagagaattgtgtggtctccagctctactttccttaaacaaatcctttctgttttctgagctgcagtgctaaaacagatccctaaaaggtaatagcatcttccagactagtttaattatttcctttataagaatatgacataaatttttattatagaaataatgtcattataattttagtgctagtacttgtgggttttctgtatttgtatcaccttgaaatttgttccatgaatagaaaatacttctttattcatgttttcaatcacttagaattattttaaatttattttgggtttgtgagagataataagattaagaacttcatcatttcagtgactttcctccaactctctgaatctgctacctcttattatatgtcccttagcagtacttttccagttaggttcgttaccctgctcattagctaaacctctttatcttgtgcctcaaaagagcttttacttttcttagaaacatttataaaaaagaaaaaaactgacacgcattcattcaaaaaagtatttattgggctttagggattagatacacaacagtggaaaaatggcatcttagcacactcagaatttattgtgcagcagttgtgtattttaaggaatctgtagttaaaaggaagagatccaaaggtcctgataacatttcctaacgtttcagaagagttgtcattgagtagtgtttggatttcctctctgtatccctcaccctaccattttctcctttattcttctaagattgttagcgttgttactcaaaacatacacatacaacataccagatggtgctgttctaatggtatttgttcacgtaatttaacgttcttactgcttatactatatacatatttaattttgttgggagcaagaaggttttcaagaaaagataattttgtattagtgtaggaatatattagacaaatgtttagttggtcaaattatgcataagatatttgtaactttaaacattgcaaattgaccagctagctatggaagcataaaattaattgataattaatgttggaaatacatttctaaaatttatatttttatggtgttagcctgtaagagcattttagcatattgaaatgcatgctgcttaagatgtgtctggttcaaatatcaaaacttgctgggtcatttttacatagtagaaacatactgtctatgtgttgcccaattgctgtttgtccactctgaattctggaccctttttggactaagaattagttaaattcatgaactaagagaattagagatggggtagagtaggatcaggacagtggggttacaacagataggaaaggaaagtcagcatttgagtgtagagaaaaaaagaggatcatacagatgtcatcaaattataggctttaatacaggttgctttttttaatccaaaaggaaaagcacttatcctatcagaatgtctaccatgttttatagtaataatttgtgtaaaaaattgaatttttgaatagttttttgtattttttgtgatgaaaaactcataacataaaatttaccatattaactgtttctaaagaatacagttcagccatgtgaagtacatttacactgttgtgaagcagatctccagaactttttcatcttgcaaaactgaaactccatacccattaaacaactcccctttttgttttctcctcagtggaatagaattttgactccatataaatcaagaaacacctaaattctttagttgtttgtgtttgcaagatctaaggtcatggtaaacattaagttcttaaaatttttgggagggacagtgcacctctcctctgaattgttagcaattaaattgagtaggttttaaatgtctattcattggaagggtttgttatttcattttgagccagaggggagaggcacattttaaatatcagaattagattagctttgagtttgtacaattgggaacataatagattttcataaattatgtgtgccttgttggaagtgtcaactgtctttatgtctgcttgtaaaagtttcaaaatatgttttccctcaaaaaggcaacgttacttcatttgcttgaatattatgataggaatgcttactgatattacttgatagtcatatatagcctaggaaatttaacatatatataactatagcagtattaataatgatagttgtacttctttaaaacattaaatttgaggaaactttaatgctgtctcgtgtacattgctttactacagtgagggggaatatcctttagattgagcctcaatttactggttagtagtatgtgaaactctggtataaaaacgtaaactagacagtagagccgatgaattaaaattgtaaattgctacattggcattttctacctccttttctgtcagagtattactttttccagcatttattcttatttgtgagtaaagaggaaatgggaacctgaggttaaaattgacatttttgtttcattgagaatttaagcagtaggtacaggagaagtgacttgtcacattaatttggtgcctaaatctgtaactacaagttgtgatcgacatgtacaaaatgtctaagaaaggtcatatgctgaatattttacttttcctgtatagtctgcatgatttgtttcataaacccagcttatttcctccaaaaagcaaaatggtcctgtaatttttaaagtaaaataaacgtgccattttgtctgcaatctataatttcaggaagttattgaaagttctgactcagggctttttaacagttcaagcaattgtcagttatattttggaaactccatctgtgtaattctccagtgccttgaaagaattattaacttggcaacactattaaaactttataaaagatggtctttagtgcacgtgtatcattatatacacgttttaaagtcatattgcttagcttgttaataatgattctgcatgtgtgctgggtttgggtaattctttaaaggaagttttctagatttgcacttgatgtttgttttttaaaaactgattatttatggccgtgacactgttaccagaaaagtaattctaattaagttattatgcaaagtcatctataagtagcatctgggaagaggagatcgaggccacagtttgctattttagtatgaaaggaggatctgtttgggaaacatagattgtcttcccctcaaatgaggggaaaaaaaaaagaccctttgttcaaatggattctgttgtaaaaaattatttttaaaggaaatcacaaattgtatgtcattcttaatgctagtcttatagaataaatccataaaattgtttttatgttcagtatgtttatgtcattctaaatgcagcaaattcaatgatagcagttcaattgactcatagcagtgttttgtattttttctaattctttagctttcaatattggattaaagtcttgtttgtgaatatagtttccgtatggcaaatgatttcttgcttattagcttttgttaaagaatgcttagtaagagctaagcttttaaaagtaatgcaaacatttatcgttaataaaacctatggtgtaatatcatataatgcttttctttgatctttggagaattattcttttatagtagtatacatgaattttgatttttaaagcatttaaaaacaaatctcaatacattaaaaaacctgttattgttaaaaaggaaattaccatgcctttaagaaacaaggatgtacatcttcaattcagcataagtgtccacatctagaaggctctcattgcagttgtttacagttaaggtacctctatctaaagggccaaagaagcatttcatattttaacacctcacattctttcaggattaagacatatgaaaatagtctgaataggataaatttgataggaagtaacttaaccagtctggaagattcagctttttctataaaaagcttattcctcttcacaactcagatgtagatttcattttcaagaggtagatattttaaagcaatgatctatttgggttttagttttatgagtaaatcattaattgtatggtttgggggttattttattttccatgttaatataagcacttatttctgaagttattgagaggtcatctagctccagttcaaaagattatgtatatctgatgtttaagaggaaaaacatctgaaaaaatatcttttgtttatttgaaaaaagcatatatattccaactttaaaattgtgaatttattttgagtaacctctaattaactgtatttttttgtttctgttgctgtatagttagaaatttcatggcaatattttttactaaattgaaactataggttttaaaaataaagacattttagaaaa

SEQ ID NO: 229 - DNA, 1081 bp, Homo sapiens
agtttgtagcggacaacatggcggccttcatgctgggctcgctgctgcggacgttcaagcagatggttccttcatcagcttcaggccaagttcgaagtcactatgtagactggagaatgtggcgcgatgtgaagagacgaaaaatggcctatgaatacgcagatgagaggctacgtattaattcactcaggaagaataccattttgccaaaaattcttcaggatgtggctgatgaagaaattgctgccctcccccgggatagctgtcctgttagaatcagaaatcggtgtgttatgacgtcccgtccgcgtggtgtgaagcggcgctggaggcttagtcgtatagtcttccgtcacttagctgaccatgggcaactttctgggatccagcgagcgacatggtaaatgagctccagaacctattgagcttgcagggaagccaagcttgcagttccagcaagcaaagattttttttaatagaccaaaccctaatctctacaggggcccagtacagttgtttggcctacctgatgctatctctaaactacttttaaaatgaagacatttgggtgtttcatgtcagtgaattatcttttctcttggacttaacaaacatactgttcccatacatagtacaaagagtagcataataaatattttctgtgaatgttttttataccctccttttaagtttaatcttttagtaacatataggggtttttgtattaagagcattatttcataaaatgctatcttatacataatccaactaattgacatgtagctcatgtatggcagtttgtaatcctggactagctttgctgacctgcagagctccccttaactattattgttagataaacagattggatagcaaggctgctgttctggattatctaatgctccacttcttcttgtgatggctgaacaaaagaaccactaagtgttttcttgtccatccttaagggactttaaaacaaattatgcctctttaagtccttgaaagtctccatctaaagaggaaaagtttgttggaacagtatatattccctatttttatgtttatttaatccataacagaa

SEQ ID NO: 230 - DNA, 2950 bp, Homo sapiens
gcgccgagcgccgccgccgccgccgccgccgccgctccgctgcccgcgccgcccgcggctcccgatggagactgacgcgccccagcccggcctcgcctccccggactcgccgcacgacccctgcaagatgttcatcgggggactcagttggcagactacgcaggaagggctgcgcgaatacttcggccagttcggggaggtgaaggagtgtctggtgatgcgggaccccctgaccaagagatccaggggtttcggcttcgtcactttcatggaccaggcgggggtggataaagtgctggcgcaatcgcggcacgagctcgactccaaaacaattgaccctaaggtggccttccctcggcgagcacagcccaagatggtgactcgaacgaagaagatctttgtgggggggctgtcggtgaacaccacggtggaggacgtgaagcaatattttgagcagtttgggaaggtggacgacgccatgctgatgtttgacaaaaccaccaaccggcaccgagggttcgggtttgtcacgtttgagagtgaggacatcgtggagaaagtgtgtgaaattcattttcatgaaatcaacaacaaaatggtggaatgtaagaaagctcagccaaaggaggtgatgtcgccaacgggctcagcccgggggaggtctcgagtcatgccctacggaatggacgccttcatgctgggcatcggcatgctgggttacccaggtttccaagccacaacctacgccagccggagttatacaggcctcgcccctggctacacctaccagttccccgaattccgtgtagagcggacccctctcccgagcgccccagtcctccccgagcttacagccattcctctcactgcctacggaccaatggcggcggcagcggcggcagcggctgtggttcgagggacaggctctcacccctggacgatggctccccctccaggttcgactcccagccgcacagggggcttcctggggaccaccagccccggccccatggccgagctctacggggcggccaaccaggactcgggggtcagcagttacatcagcgccgccagccctgcccccagcaccggcttcggccacagtcttgggggccctttgattgccacagccttcaccaatgggtaccactgaagcaggggacggtggcaggagcgccccagcctgcagctgactgaggaccacgagtgagccagcgagggggcgggagacctcagccgcagccgccgccccctcccctgcagcgactcggacccgctactgcctgcccccaactccccgggcccggcccctgccctgctgcccccaacagcgtctggctcccctactaacgtccccctcttcgcccttgcccccatccccacccgcccctctcccggccctgcttttatttattttggattagccggttgcccaccccagccctctggtccatccctccctccgtgccgcgcccccctaggaccgccccctccccaaaaggcttttggatttgtgcatagctggagtgaaggcggagggagcctgctacaggccgcagcccaacccctgttttttattcagatttcccctcctttaccctttccctttttttttttttttttttttttaaagaaaccttttttaaactatttctaggtttgtgaatgtgaagccccaggccgcagggggcaaggggccaggtgccccccaccagctgagaacaaagtgtctatctgggtgtgggcccctggccgcctccctccagccctggagaggagggcagggctgcggggaggccaggccgagcccctggaaccatcccgtcctgtatcatatgtaaatactgtgaggtgatgtgcccacccctctctaagacccctcgggggtgaggggctcccccctcccctgtttctgtcccctcagacaccgttactgtaagcttgcaggcctcagctgtggccacggcaggcccgctctctcaggccctcagggtcaaggccttggttggacctgcccactccaaaaacccagtgtgggggcaaagggcgtgggaagagcagggcttgcccagcgacactgctggacaggaattaactctccaaaggtctcccctgctccctacctaggttggggcttcatggtttctgctcagtctgtcccccttccccctcgacccccgcaatgagtgggcaccaggggacgctctggcgagggcagaccccaggggaaagcaaagggcgtctcagggaacccccacattctctcactgaagtttcccaccaggatgaccccacagccagagtcccttggcagcccctcaccccagaccccccttctaaggaaaaagagaggttcagagcgttggaccttcatgaacagtggcctggctggcgtggcagggccaaggcccacccactgccatcccccttctgtgtgtccctctcccccagttatgaggcccagggcctgagctctcttccccagcattgcccccacccggaaaccccacctttggagagttaattgtctgtgtgaggtgcttaacctatcagccctgagaacacaaagcaataatctttgttactgagatgcgcggctgttcgtgttttgggttttttttttttttaatgtttcctaataaaagagaagctgcattttattggtttttatttttaattttctacacgtttgagctgagtcctgagacacttagcttccctctccctcattcccggacccttccaccccactgggcccaaccatgggctcaggaccctggaattccgttttctgatttgctttgggattttttttttttttaagatgttacatggtgtttcgaagccagcaagttaccatcctccggtgtctcttctctccacatctgtaacttctttttccaggttttattttcagttttaaattcctaataaattatttgaaaacgtt

SEQ ID NO: 231 - DNA, 1012 bp, Homo sapiens
tttttttttttttttcttgaatgtgcttcgcaagccaggctatcttccaaggaaggcagacagtgggagagcagagggactgactgcaggcaagcacattgaagaaagacactggcgggtttccccaccctcaccccaaagcagaaaactagcagacgtcagctcagccccgtcctgggcacagacactacacaaggagacgctggaagttaagcaatactttaatactgtaatatgtttgttttctttttctttcttttttttctaccaaaaaaaagtaagtaaactaaaacacaaaaacatataaataaaatccatccctcttgtcggggacctgcaggggggcaaccttaatccaaacacctggctatcaaataatcagaatgtattgtctcagacaggatttcagttccgggaggcaggggcatgatgggggagggggccggaggctgagagacaaaagttccagagcctccctcgaaggttctctactactgtattctgtacataatgtaccatcccatgtggaatctgtgagtgtcctcttaagtagcgtgggctagccaatctgccgttcatggtgtattgtaaactccgaattccatatgtaataggatgcaagtctaagcgtttcatgtggacataaatgtatctaaataaaactttccctagcactgtggctgacctcacccttacttttatactttagtatgaaactgatgagaactttggtagtgagtattttttttatatatatacatatatatgtatctatctatatatatatctcaagcatctttcaggtctttgtgtgtggctttcttaaagccctgttgtaaaaaattactatgtggatggcagtctctcacatcacagatgtggaaagtataattttatatttgtattttcaaataaataagtttgtgaaaggtttccatcctctactgtggtccagaaatcaatgtgtttgtctgacaaaaaaaaaaaataaaataaaataaactgttttgaa

SEQ ID NO: 232 - DNA, 4170 bp, Homo sapiens
ctcttcccttaggtgtttaagttccgcgcgcaggccaggctgcaacctgacggccagatccctcgctgtcctagtcgctgctccttggagtcatgttcccagccgccccttctccgcggaccccgggtaccgggtcccgaaggggcccgctggccggactcgggcccggctccacgccccggacggctagcaggaagggtctgcccctggggtctgcagtcagctccccagtgctcttctcgccggtcggccggcgtagctcgctaagctcgcggggaacaccaacacgaatgttcccacaccactccataactgagtctgtgaactatgatgtgaaaacgtttggatcttctcttcctgttaaagtcatggaagccctaacattggctgaagtcgatgaccagctgaccattaacatagatgaaggtggatgggcttgtctggtgtgcaaagagaagctcattatttggaagattgctctgtcacctattactaagttatccgtttgcaaagaacttcagctgccacctagtgatttccactggagtgccgacttagtggctctttcttactcttctccctcaggtgaagcacattctactcaggctgttgctgtcatggttgccaccagagaaggatctatccgctattggccaagccttgctggtgaagatacctacacagaggcttttgtagattcgggaggtgataagacttacagtttcctaacagcagtgcagggaggaagttttattttgtcttcatcaggaagccaactaattcggttgatacctgagagctcaggaaagattcatcagcatatcctgcctcaggggcaaggcatgctttcaggaattggtcgaaaagtttcttctctttttggaattttatctcctagtagtgatctcacactttcaagtgttctctgggatagagagagatcaagcttttatagcctgacgagttcaaacatcagtaaatgggaattagatgattcttcagaaaagcatgcatacagttgggatataaatagagccctgaaggaaaacattaccgatgctatttggggatctgaaagtaactatgaagctattaaagaaggagtcaacattcgatatttggacttgaagcaaaactgtgatgggctggtgattttggcagcagcatggcactcagcagacaatccatgtctcatctattactctctgataacaatagaagataatggttgccaaatgtcagatgcagttactgtagaagtcactcaatataatccaccttttcagtctgaagacctgattttgtgtcagttgacggtcccaaacttttcaaaccagactgcctatctgtataacgaaagtgctgtctatgtgtgctccacaggaactgggaaattttctcttccccaggagaaaattgtctttaatgcacaaggagatagtgttttaggtgctggtgcctgtggtggtgttcctatcattttttctagaaacagtggactggtgtctattacttcaagggaaaatgtgtctatattggcagaagacttggaagggtctttagcatcttcagttgctggaccaaacagtgagagtatgatttttgagaccactacaaagaatgaaactatagcccaggaagataaaatcaagttgctgaaagctgcctttctgcaatactgcagaaaagatttaggtcatgctcaaatggtggttgatgagctcttttcctctcactctgatttggattctgattctgaactagacagggcagttacccaaatcagtgtagacctgatggatgactacccagcatctgacccacggtgggctgagtctgtccctgaggaagcacctgggttcagcaatacgtcactgattatccttcaccagctagaagacaagatgaaagctcactcttttcttatggactttattcatcaagttggcttatttggacgtctaggcagttttccagttagagggacaccgatggccactcgactgttgctctgtgagcatgccgaaaagctgtcagccgccattgttctcaagaaccaccactcccggctttctgaccttgtcaacacagccatattgattgctttgaacaagagggagtatgaaatcccatccaacctgactcctgcagatgtctttttcagggaggtatcccaagtagataccatctgtgagtgcttactggagcatgaggagcaagtcttgagggatgcacctatggattccattgaatgggctgaagtggtgatcaatgtgaacaatattctcaaggatatgctgcaggctgctagtcattatcgccaaaatagaaactctttgtatagaagagaagaatcactagaaaaagaacctgaatatgttccatggacggcaacaagtggtcctggtggcatccgaacggtaataatacgccagcatgagattgtcctgaaggtggcttatccacaggcagacagcaacctccgaaacatcgtgaccgagcagctggtagccctgatcgattgcttcctggatggttatgtttctcagcttaagtctgtggataaatccagtaatcgggaaagatatgacaatctggagatggaatacctacagaaaagatcagatctcttatctcctcttctttcactaggccagtacctgtgggctgcttctctagcagagaaatactgtgactttgatatattggtacaaatgtgtgagcagactgacaaccagagccgactccagcgctacatgacccagtttgctgatcagaatttttcagactttctcttccgttggtatctggagaaaggaaagcgaggcaaattattatctcagcccatttctcagcatggacagttggcaaattttttgcaagctcatgaacatctcagctggttacatgaaattaatagccaagaattagaaaaggctcatgcaacacttctgggtttggcaaatatggaaactcgttactttgcaaagaagaaaacccttcttggcttgagtaaattggctgcattagcttcagacttttcagaggatatgctacaagaaaaaattgaagaaatggctgagcaggagcgctttctactgcatcaggagaccctacctgaacagctgctggcggagaaacagctaaatctcagtgcgatgccagtattgactgcaccacaactcattggtctatatatctgtgaagaaaatagaagagctaatgaatatgatttcaagaaagctttggacttgttggaatatattgatgaggaagaagatataaatataaatgatctaaaactggaaatcctttgcaaagctcttcagagagataactggtccagttctgatggcaaagatgatccaattgaagtatctaaagacagtatatttgtgaagatcttacagaaacttttaaaagatggcattcagctcagtgagtacttaccggaggtgaaagacctgctacaagcggatcagcttggaagcttaaagtccaatccttacttcgagtttgttttgaaagcaaattatgaatattatgttcagggacaaatataactttttctaaaaatggccattgtttatgaaatctgtataagtgtgtccttatacaaattttaggccataaacaagtgtaagtttgtacaatttcataacatgtatagctgagtttttatactttatatgtaggaagctaatataaaatagttatgtaactgtgattttggttttcagttatgtgacttgttttttccacctgaaatgtgtcagttgttgttcctgtactcggtgccctttctttttactctcacgtggtcccaggttctggagttcttgtcctggttctagctgctcacatgtacaaatcacttctaggcctcagtttctgcgactatgaaaattactagattgcactagcttgtctctaaaattgctgtgactccagatactttgcactgaagagaatctagggtgtttgatatctgtttcagttagggctaatgggaaatgtctagtaagataaatgtcaacttttgctgacttattatgagatgaaaaaccaaaggagagtgggcctaactcatgtgagcttgataactgatgaactcattgggagcattttaaacttttctacataaataataaatgagcactaatgaaagta

SEQ ID NO: 233 - DNA, 2705 bp, Homo sapiens
cacatggaaactgttcttaaagctgctgggccctgaaattttactcagcagtttgaaatcaagacatagcttttctcattcaccctcccacttggggctaatgcacagacatgaacatctattgaggaaaaccacaaaaaacttcaaaacagctacaacgactctgcagtctacacttctcctgttactgcttgtgcctctgataaagccagcaccaccaacccagcaggactcacgcattatctatgattatggaacagataattttgaagaatccatatttagccaagattatgaggataaatacctggatggaaaaaatattaaggaaaaagaaactgtgataatacccaatgagaaaagtcttcaattacaaaaagatgaggcaataacaccattacctcccaagaaagaaaatgatgaaatgcccacgtgtctgctgtgtgtttgtttaagtggctctgtatactgtgaagaagttgacattgatgctgtaccacccttaccaaaggaatcagcctatctttacgcacgattcaacaaaattaaaaagctgactgccaaagattttgcagacatacctaacttaagaagactcgattttacaggaaatttgatagaagatatagaagatggtactttttcaaaactttctctgttagaagaactttcacttgctgaaaatcaactactaaaacttccagttcttcctcccaagctcactttatttaatgcaaaatacaacaaaatcaagagtaggggaatcaaagcaaatgcattcaaaaaactgaataacctcaccttcctctacttggaccataatgccctggaatccgtgcctcttaatttaccagaaagtctacgtgtaattcatcttcagttcaacaacatagcttcaattacagatgacacattctgcaaggctaatgacaccagttacatccgggaccgcattgaagagatacgcctggagggcaatccaatcgtcctgggaaagcatccaaacagttttatttgcttaaaaagattaccgatagggtcatacttttaacctctattggtacaacatataaatgaaagtacacctacactaatagtctgtctcaacaatgagtaaaggaacttaagtattggtttaatattaaccttgtatctcattttgaaggaatttaatattttaagcaaggatgttcaaaatcttacatataataagtaaaaagtaagactgaatgtctacgttcgaaacaaagtaatatgaaaatatttaaacagcattacaaaatcctagtttatactagactaccatttaaaaatcatgtttttatataaatgcccaaatttgagatgcattattcctattactaatgatgtaagtacgaggataaatccaagaaactttcaactctttgcctttcctggcctttactggatcccaaaagcatttaaggtacatgttccaaaaactttgaaaagctaaatgtttcccatgatcgctcattcttcttttatgattcatacgttattccttataaagtaagaactttgttttcctcctatcaaggcagctattttattaaatttttcacttagtctgagaaatagcagatagtctcatatttaggaaaactttccaaataaaataaatgttattctctgataaagagctaatacagaaatgttcaagttattttactttctggtaatgtcttcagtaaaatattttctttatctaaatattaacattctaagtctaccaaaaaaagttttaaactcaagcaggccaaaaccaatatgcttataagaaataatgaaaagttcatccatttctgataaagttctctatggcaaagtctttcaaatacgagataactgcaaaatattttccttttatactacagaaatgagaatctcatcaataaattagttcaagcataagatgaaaacagaatattctgtggtgccagtgcacactaccttcccacccatacacatccatgttcactgtaacaaactgaatattcacaataaagcttctgagtaacactttctgattactcatgataaactgacatggctaactgcaagaattaaatcttctatctgagagtaataatttatgatgactcagtggtgccagagtaaagtttctaaaataacattcctctcacttgtaccccactaaaagtattagactacacattacattgaagttaaacacaaaattatcagtgttttagaaacatgagtccggactgtgtaagtaaaagtacaaacattatttccaccataaagtatgtattgaaatcaagttgtctctgtgtacagaatacatacttattcccatttttaagcatttgcttctgttttccctacctagaatgtcagatgtttttcagttatctccccatttgtcaaagttgacctcaagataacatttttcattaaagcatctgagatctaagaacacaattattattctaacaatgattattagctcattcacttattttgataactaatgatcacagctattatactactttctcgttattttgtgtgcatgcctcatttccctgacttaaacctcactgagagcgcaaaatgcagctttatactttttactttcaattgcctagcacaatagtgagtacatttgaattgaatatataataaatattgcaaaataaaatccatctaaatagaaa

SEQ ID NO: 234 - DNA, 4001 bp, Homo sapiens
aggcatcagcaatctatcagggaacggcggtggccggtgcggcgtgttcggtggcggctctggccgctcaggcgcctgcggctgggtgagcgcacgcgaggcggcgaggcggcagcgtgtttctaggtcgtggcgtcgggcttccggagctttggcggcagctaggggaggatggcggagtcttcggataagctctatcgagtcgagtacgccaagagcgggcgcgcctcttgcaagaaatgcagcgagagcatccccaaggactcgctccggatggccatcatggtgcagtcgcccatgtttgatggaaaagtcccacactggtaccacttctcctgcttctggaaggtgggccactccatccggcaccctgacgttgaggtggatgggttctctgagcttcggtgggatgaccagcagaaagtcaagaagacagcggaagctggaggagtgacaggcaaaggccaggatggaattggtagcaaggcagagaagactctgggtgactttgcagcagagtatgccaagtccaacagaagtacgtgcaaggggtgtatggagaagatagaaaagggccaggtgcgcctgtccaagaagatggtggacccggagaagccacagctaggcatgattgaccgctggtaccatccaggctgctttgtcaagaacagggaggagctgggtttccggcccgagtacagtgcgagtcagctcaagggcttcagcctccttgctacagaggataaagaagccctgaagaagcagctcccaggagtcaagagtgaaggaaagagaaaaggcgatgaggtggatggagtggatgaagtggcgaagaagaaatctaaaaaagaaaaagacaaggatagtaagcttgaaaaagccctaaaggctcagaacgacctgatctggaacatcaaggacgagctaaagaaagtgtgttcaactaatgacctgaaggagctactcatcttcaacaagcagcaagtgccttctggggagtcggcgatcttggaccgagtagctgatggcatggtgttcggtgccctccttccctgcgaggaatgctcgggtcagctggtcttcaagagcgatgcctattactgcactggggacgtcactgcctggaccaagtgtatggtcaagacacagacacccaaccggaaggagtgggtaaccccaaaggaattccgagaaatctcttacctcaagaaattgaaggttaaaaaacaggaccgtatattccccccagaaaccagcgcctccgtggcggccacgcctccgccctccacagcctcggctcctgctgctgtgaactcctctgcttcagcagataagccattatccaacatgaagatcctgactctcgggaagctgtcccggaacaaggatgaagtgaaggccatgattgagaaactcggggggaagttgacggggacggccaacaaggcttccctgtgcatcagcaccaaaaaggaggtggaaaagatgaataagaagatggaggaagtaaaggaagccaacatccgagttgtgtctgaggacttcctccaggacgtctccgcctccaccaagagccttcaggagttgttcttagcgcacatcttgtccccttggggggcagaggtgaaggcagagcctgttgaagttgtggccccaagagggaagtcaggggctgcgctctccaaaaaaagcaagggccaggtcaaggaggaaggtatcaacaaatctgaaaagagaatgaaattaactcttaaaggaggagcagctgtggatcctgattctggactggaacactctgcgcatgtcctggagaaaggtgggaaggtcttcagtgccacccttggcctggtggacatcgttaaaggaaccaactcctactacaagctgcagcttctggaggacgacaaggaaaacaggtattggatattcaggtcctggggccgtgtgggtacggtgatcggtagcaacaaactggaacagatgccgtccaaggaggatgccattgagcacttcatgaaattatatgaagaaaaaaccgggaacgcttggcactccaaaaatttcacgaagtatcccaaaaagttctaccccctggagattgactatggccaggatgaagaggcagtgaagaagctgacagtaaatcctggcaccaagtccaagctccccaagccagttcaggacctcatcaagatgatctttgatgtggaaagtatgaagaaagccatggtggagtatgagatcgaccttcagaagatgcccttggggaagctgagcaaaaggcagatccaggccgcatactccatcctcagtgaggtccagcaggcggtgtctcagggcagcagcgactctcagatcctggatctctcaaatcgcttttacaccctgatcccccacgactttgggatgaagaagcctccgctcctgaacaatgcagacagtgtgcaggccaaggtggaaatgcttgacaacctgctggacatcgaggtggcctacagtctgctcaggggagggtctgatgatagcagcaaggatcccatcgatgtcaactatgagaagctcaaaactgacattaaggtggttgacagagattctgaagaagccgagatcatcaggaagtatgttaagaacactcatgcaaccacacacaatgcgtatgacttggaagtcatcgatatctttaagatagagcgtgaaggcgaatgccagcgttacaagccctttaagcagcttcataaccgaagattgctgtggcacgggtccaggaccaccaactttgctgggatcctgtcccagggtcttcggatagccccgcctgaagcgcccgtgacaggctacatgtttggtaaagggatctatttcgctgacatggtctccaagagtgccaactactgccatacgtctcagggagacccaataggcttaatcctgttgggagaagttgcccttggaaacatgtatgaactgaagcacgcttcacatatcagcaagttacccaagggcaagcacagtgtcaaaggtttgggcaaaactacccctgatccttcagctaacattagtctggatggtgtagacgttcctcttgggaccgggatttcatctggtgtgaatgacacctctctactatataacgagtacattgtctatgatattgctcaggtaaatctgaagtatctgctgaaactgaaattcaattttaagacctccctgtggtaattgggagaggtagccgagtcacacccggtggctctggtatgaattcacccgaagcgcttctgcaccaactcacctggccgctaagttgctgatgggtagtacctgtactaaaccacctcagaaaggattttacagaaacgtgttaaaggttttctctaacttctcaagtcccttgttttgtgttgtgtctgtggggaggggttgttttggggttgtttttgttttttcttgccaggtagataaaactgacatagagaaaaggctggagagagattctgttgcatagactagtcctatggaaaaaaccaagcttcgttagaatgtctgccttactggtttccccagggaaggaaaaatacacttccacccttttttctaagtgttcgtctttagttttgattttggaaagatgttaagcatttatttttagttaaaaataaaaactaatttcatactatttagattttcttttttatcttgcacttattgtcccctttttagttttttttgtttgcctcttgtggtgaggggtgtgggaagaccaaaggaaggaacgctaacaatttctcatacttagaaacaaaaagagctttccttctccaggaatactgaacatgggagctcttgaaatatgtagtattaaaagttgcatttgaaattcttgactttcttatgggcacttttgtcttccaaattaaaactctaccacaaatatacttacccaagggctaatagtaatactcgattaaaaatgcagatgccttctctaaaaaaaaaaaaaaaaa

SEQ ID NO: 235 - DNA, 2309 bp, Homo sapiens
gcgggggcgggccggggcggggccaggccggctagaggggcgggtctagcggcggcccccggcgaagttcactgcgcttgcgctgacagacgcaagatggcggacagtgcggaactaaagcaaatggttatgagccttagagtttctgaactccaagtactgttgggctacgccgggagaaacaagcacggacgcaaacacgaacttctcacaaaagccctgcatttgctaaaggctggctgtagtcctgctgtgcaaatgaaaattaaggaactctataggcggcggttcccacagaaaatcatgacgcctgcagacttgtccatccccaacgtacattcaagtcctatgccagcaactttgtctccatctaccattccacaactcacttacgatggtcaccctgcatcatcgccattactccctgtttctcttctgggacctaaacatgaactggaactcccacatcttacatcagctcttcacccagtccatccggatataaaacttcaaaaattaccattttatgatttactggatgaactgataaaacccaccagtctagcatcagacaacagtcagcgctttcgagaaacctgttttgcatttgccttgacaccacaacaagtgcagcaaatcagtagttccatggatatttctgggaccaaatgtgacttcacagtacaggtccagttaaggttttgtttatcagaaaccagttgtccacaagaagatcacttcccacccaatctttgtgtgaaagtgaatacaaaaccttgcagccttccaggttaccttccacctacaaaaaatggcgtggaaccaaagcgacccagccgaccaattaatatcacctcacttgtccgactgtccacaacagtaccaaacacgattgttgtttcttggactgcagaaattggaagaaactattccatggcagtatatcttgtaaaacagttgtcctcaacagttcttcttcagaggttacgagcaaagggaataaggaatccggatcattctagagctttaattaaagagaagttgactgcggatccagacagtgaaatagctacaaccagcctaagggtttctctactatgtccacttggtaaaatgcggctgacaattccgtgtcgggcccttacatgttctcatctacaatgttttgacgcaactctttacattcagatgaatgagaaaaaaccaacctgggtttgtcctgtctgtgataagaaggctccatatgaacaccttattattgatggcttgtttatggaaatcctaaagtactgtacagactgtgatgaaatacaatttaaggaggatggcacttgggcaccgatgagatcaaaaaaggaagtacaggaagtttctgcctcttacaatggagtcgatggatgcttgagctccacattggagcatcaggtagcgtctcaccaccagtcctcaaataaaaacaagaaagtagaagtgattgacctaaccatagacagttcatctgatgaagaggaagaagagccatctgccaagaggacctgtccttccctatctcccacatcaccactaaataataaaggcattttaagtcttccacatcaagcatctccagtatcccgcaccccaagccttcctgctgtagacacaagctacattaatacctccctcatccaagactataggcatcctttccacatgacacccatgccttacgacttacaaggattagatttctttcctttcttatcaggagacaatcagcattacaacacctccttgcttgccgctgcagcagcagcagtttcagatgatcaagacctcctacactcgtctcggtttttcccgtatacctcctcacagatgtttcttgatcagttaagtgcaggaggcagtacttctctgccaaccaccaatggaagcagtagtggcagtaacagcagcctggtttcttccaacagcctaagggaaagccatagccacaccgtcacaaacaggagcagcacggacacggcatccatctttggcatcataccagacattatttcattggactgattcccaggccctgctgctcccatccccaccccagatcgaatgaacttggcagaaagaagagaactttgtgctctgttttaccttactctgtttagaaaagtatacaagcgtgttttttttcctttttttagggaaaaaattaaaagaaatgtacagagaacaaaactatattttcagttttacttttgtatataaatctaagactgcctgtgtgataaaacacttgtttaaaaaaaaaaaaaaaaaaaaaaaaaaaa

SEQ ID NO: 236 - DNA, 3157 bp, Homo sapiens
cccgccccgactgggcaggcgggggagcccctacttctctccccccgggcgggggagccggggggcagcgccggagcccggggggagctcagccccgccgaccggccggccagggcagggggcagctaggacggccccggtccaggtggaggccgcagagggcccagggcaagcagaggcagcaatggttggtcctgacggtggctgagcccccagcccctggaatatgcagcccgggggagccccagacagcggcaaggacgaggtggcggagtggggcgggaggcatggtctccacctaccgggtggccgtgctgggggcgcgaggtgtgggcaagagtgccatcgtgcgccagttcttgtacaacgagttcagcgaggtctgcgtccccaccaccgcccgccgcctttacctgcctgctgtcgtcatgaacggccacgtgcacgacctccagatcctcgactttccacccatcagcgccttccctgtcaatacgctccaggagtgggcagacacctgctgcaggggactccggagtgtccacgcctacatcctggtctacgacatctgctgctttgacagctttgagtacgtcaagaccatccgccagcagatcctggagacgagggtgatcggaacctcagagacgcccatcatcatcgtgggcaacaagcgggacctgcagcgcggacgcgtgatcccgcgctggaacgtgtcgcacctggtacgcaagacctggaagtgcggctacgtggaatgctcggccaagtacaactggcacatcctgctgctcttcagcgagctgctcaagagcgtcggctgcgcccgttgcaagcacgtgcacgctgccctgcgcttccagggcgcgctgcgccgcaaccgctgcgccatcatgtgacgcctgcgcgcccctcgggctgcaccggcactggccgagcggagggcggggccgtactgcggggctggggcggggagcgggcgggaaatggaactgtgacggtcccggcctgaggcccctgcagccacgcacctcccggtgagaagcagagcgcgagagggagccctccgtaactgcccagccctgccccttgcccccgtggcttcctgggacagccgccttcagtgctgtatttagtgcagtgcccggcccgacccgcgggggtgccacagccttttgggatgggggtgagcgtgcaatggaggctgggggtggcgaggtgccgccttggccgggcccccacgtgtcttctccagaatgtgtctgtctttgcctggtgtcttcctttcccgtgtccgcccaccccagcgtctgttggtacttacctgtctcacctaccctccagtcccctcccagctccgctcacagggctctcatttcgtccatccccttgtcgcagatcctggcagcttctttgtgaggccaggccttctgactgtcagcaccaccggcacagggcagagatgcgggtggcccaaggaccacgatcaaggggtccgggggaccgaggtcccagatcagtgaggggagaaggttgagctctccggcttccagggagacctccccgcccagcagcccccagagacacaacaacctaccttccagccttaactcgatggtccgtccctgccaggtgcccctcactcttcctgaccccaaagccagatcaccccctgggttaaaactttttttctttttttttttggacagagtgtggaaagggagccccccaaaggatagcttctttttcatgatgccaggctccagtcctttattcccttctgcatactgcaatctgatctgtcagactggggaatgttgggttctggggtctggtcgtgggcaggatggtgcccagaagggggttaggttgtcccagtgaaaattctgttgccccgtctcaaccccatctgactaccccagactctgcctgcctcagatctcagactatcctgattaatctggggaagaacagagccagggaaagaatggtggggacccctgtacttgggggagacacacctgcatcttcctcctgccacagatggaggccctcaggatctgacaccctcttgtcccaacaccagtcagccctataccctaactcactccaccccattttctccggctgcctggccgggtttctacctctcgtcaccggagctgatcactgtcagttttgtaccaatttagaaataacaataataatgaagattctaggaatggcatgagggattgatgggggacttggagggagggacaagtggtgccctgtcccctgctcccctggccaaagaaagctgtccttgaggctgagccctcagccctggcctggtggggggacagcaaggtcccttgttataagaggggcagagaggacaactccgctttggccaacctagccaaggctgcagcatatagaccaggaaatcaggtagcccagactggtgatggagcagagtctgggggaagggtcgtgggtggggaatttatcaccaacatccattgtagggggaatctatgattctgcttccccagcggattcccactctgtccaccaagtggggggtagcacagcctcacagcaaccgccctgaccttgggcagtctagtgttcctgcattctagtccctgctgtgctgcaggactttgggcaagtgacctgccctctgtgagcctccctctgacacagaggaggtggctccccttccccacaccttagagtggctgggagggtaacaaagagggcctgcccctttagtctcctgcacccctgccccctggttcaccagagggagcggatgaaggatggcagcatctcacatgccccatcaccaactctgaggcacctggggtgggggggcggagcccaggcctctggctgctcccctgtgggagccattggaatgtatcccctgacaggcccccttccgcctccacctcaacccaggtcttggatttcaggtccctccacccccattctgagtctctgtccttctccttccacccgctcccagggtttcccaccacagggtctggaagtgtgtgtgacgcccattgagctgttacccgaagtcagattaaaaatcagggagtgttttccctcgtttctgtaaaaaaaaaaaaaaaaaaaaaaaaaaaaaaaaaaaaaaaaaaaa

SEQ ID NO: 237 - DNA, 1115 bp, Homo sapiens
caaagttcatagcaggttgaacatgcttgctgtcattttcacagattctggtctttcttatggggaacctgagttcctgcattaaagttcccccagaagatcaatggaaggtggattccaaagagtgggcaagtgaggaccccttctctgttaccaaggtgaccccaaggaacacagtaaatgtggcggcttatttggcctccccaggacggactggagcatcagtagtgcctgagttcatcaaaggacagatgctcaagacaccctgatcaccattaggtggaattgaaggagccaaaaatgggcgcagtggctcctcagcagagacgctcctgaatgtatagacatgggaaccactttcagcatcaaaaaaggaaacgttctgcatgcccatatccagaaaaatccccactcgctgtaacttgcggtctactaagaggaaagtcagcggcaccgtgctggcagagaggcggcttccatccctcaaactcacagtccagaatccaagctctgtggtcagctggatcttccctttgcagtgaacagattctctgcagactcccaggtcccattctgtgcttgttcccacgtccacctcccagtagtggcggccacaggtaaagcgaggggagcccaggatgcaaacggacacgtcaaatctctcggcaaggtcttgccgattctgtgtgatgagcccacttcggacgctcctgaggtcgtcagaaatgaggaggaagttgttggctgtgtcggcatccaaggtcatatccactgtgaaaaggaaaacaagttgctcagcaagtggacagaagccaaccccatgcctctcttctacttcaaaggcccaaatatctcctgactttagtttctttaattctgtttcttcctccaaaatcaaaacttttcatgaggaaacttccctatttcaaattttcataggtatgctttgtggcaatacgtgactcttattcacagtagcaattcttattttactttacgtcacgtgtttgcttcactgaacttttcttcatttagagtggagggtctctgaaggcagacaccatgcccccctttctaccaccttgatgtgtgaacaaataaatgataattaagac

SEQ ID NO: 238 - DNA, 2583 bp, Homo sapiens
gcatgcgcgctcgcgctcccgccctctagctgcgctcggctgagtcagtcagtctgtcggagtctgtcctcggagcaggcggagtaaagggacttgagcgagccagttgccggattattctatttcccctccctctctcccgccccgtatctcttttcacccttctcccaccctcgctcgcgtagccatggcggagccgtcggcggccactcagtcccattccatctcctcgtcgtccttcggagccgagccgtccgcgcccggcggcggcgggagcccaggagcctgccccgccctggggacgaagagctgcagctcctcctgtgcggtgcacgatctgattttctggagagatgtgaagaagactgggtttgtctttggcaccacgctgatcatgctgctttccctggcagctttcagtgtcatcagtgtggtttcttacctcatcctggctcttctctctgtcaccatcagcttcaggatctacaagtccgtcatccaagctgtacagaagtcagaagaaggccatccattcaaagcctacctggacgtagacattactctgtcctcagaagctttccataattacatgaatgctgccatggtgcacatcaacagggccctgaaactcattattcgtctctttctggtagaagatctggttgactccttgaagctggctgtcttcatgtggctgatgacctatgttggtgctgtttttaacggaatcacccttctaattcttgctgaactgctcattttcagtgtcccgattgtctatgagaagtacaagacccagattgatcactatgttggcatcgcccgagatcagaccaagtcaattgttgaaaagatccaagcaaaactccctggaatcgccaaaaaaaaggcagaataagtacatggaaaccagaaatgcaacagttactaaaacaccatttaatagttataacgtcgttacttgtactatgaaggaaaatactcagtgtcagcttgagcctgcattccaagctttttttttaatttggtgttttctcccatcctttccctttaaccctcagtatcaagcacaaaaattgatggactgataaaagaactatcttagaactcagaagaagaaagaatcaaattcataggataagtcaataccttaatggtggtagagcctttacctgtagcttgaaaggggaaagattggaggtaagagagaaaatgaaagaacacctctgggtccttctgtccagttttcagcactagtcttactcagctatccattatagttttgcccttaagaagtcatgattaacttatgaaaaaattatttggggacaggagtgtgataccttccttggtttttttttgcagccctcaaatcctatcttcctgccccacaatgtgagcagctacccctgatactccttttctttaatgatttaactatcaacttgataaataacttataggtgatagtgataattcctgattccaagaatgccatctgataaaaaagaatagaaatggaaagtgggactgagagggagtcagcaggcatgctgcggtggcggtcactccctctgccactatccccagggaaggaaaggctccgccatttgggaaagtggtttctacgtcactggacaccggttctgagcattagtttgagaactcgttcccgaatgtgctttcctccctctcccctgcccacctcaagtttaataaataaggttgtacttttcttactataaaataaatgtctgtaactgctgtgcactgctgtaaacttgttagagaaaaaaataacctgcatgtgggctcctcagttattgagtttttgtgatcctatctcagtctgggggggaacattctcaagaggtgaaatacagaaagcctttttttcttgatcttttcccgagattcaaatctccgattcccatttgggggcaagtttttttcttcaccttcaatatgagaattcagcgaacttgaaagaaaaatcatctgtgagttccttcaggttctcactcatagtcatgatccttcagagggaatatgcactggcgagtttaaagtaagggctatgatatttgatggtcccaaagtacggcagctgcaaaaagtagtggaaggaaattgtctacgtgtcttggaaaaattagttaggaatttggatgggtaaaaggtacccttgccttactccatcttattttcttagccccctttgagtgttttaactggtttcatgtcctagtaggaagtgcattctccatcctcatcctctgccctcccaggaagtcagtgattgtctttttgggcttcccctccaaaggaccttctgcagtggaagtgccacatccagttcttttcttttgttgctgctgtgtttagataattgaagagatctttgtgccacacaggatttttttttttttttaagaaaaacctatagatgaaaaattactaatgaaactgtgtgtacgtgtctgtgcgtgcaacataaaaatacagtagcacctaaggagcttgaatcttggttcctgtaaaatttcaaattgatgtggtattaataaaaaaaaaaaaaaaaca

SEQ ID NO: 239 - DNA, 3850 bp, Homo sapiens
cggcggcggcagcggcagaggtggcggcggcgtgtccgtgagagtggcgtgggggcggggaggagaggcggcggcggcagtgtccaagctacgccactcgggccggggcgttgggagcgggagtgcagagcgtggtcgtggcggcggcggtgagaagagcgaggcggaggagggggtgccatggccgggcagcagttccagtacgatgacagtgggaacaccttcttctacttcctcacctccttcgtggggctcatcgtgatcccggcgacatactacctctggccccgagatcagaatgccgagcaaattcgattaaagaatatcagaaaagtatatggaaggtgtatgtggtatcgtttacggttattaaaaccccagccaaatattattcctacagtaaagaaaatagttctgcttgcaggatgggcattgttcttattccttgcatataaagtttccaaaacagaccgagaataccaagaatacaatccttatgaagtattaaatttggatcctggagccacagtagcagaaattaaaaaacaatatcgtttgctgtcacttaaatatcatccagataaaggaggtgatgaggttatgttcatgaggatagcaaaagcttatgctgctttaacggatgaagagtcccggaaaaattgggaagaatttggaaatccagatgggcctcaagccacaagctttggaattgccctgccagcttggatagttgaccagaaaaactcaattctggttttacttgtatatggattggcatttatggttatccttccagttgttgtgggctcttggtggtatcgctcaatacgctatagtggagaccagattctaatacgcacaacacagatttatacatactttgtttataaaacccgaaatatggatatgaaacgtcttatcatggttttggctggagcttctgaatttgatcctcagtataataaagatgccacaagcagaccaacggataatattctaataccacagctaatcagagaaattggcagcattaatttaaagaagaatgagcctccacttacctgcccatatagcctgaaggccagagttcttttactgtctcatcttgctagaatgaaaattcctgagacccttgaagaagatcagcaattcatgctaaaaaagtgtcctgccctacttcaagaaatggttaatgtaatctgccaactaatagtaatggcccggaaccgtgaagaaagggagtttcgtgctccaactttggcatccctagaaaactgcatgaagctttctcagatggccgttcagggacttcagcaatttaagtctccccttctgcagctccctcatattgaagaggacaatcttagacgggtttctaatcataagaagtataaaattaaaactatccaggatttggtgagtttaaaagaatcagatcgtcacactctactgcacttccttgaagatgaaaaatatgaagaggttatggctgtccttgggagttttccatatgtgaccatggatataaaatcacaggtgttagatgatgaagatagcaacaacatcacagtaggatccttagttacagtgttggttaagttgacaaggcaaacaatggctgaagtatttgaaaaggagcagtccatctgtgctgcagaggaacagccagcagaagatgggcagggtgaaactaacaagaacaggacaaaaggaggatggcaacagaagagtaaaggacccaagaaaactgctaaatcaaaaaaaaagaaacctttaaaaaaaaaacctacacctgtgctattaccacagtcaaagcaacagaaacaaaagcaggcaaatggagtcgttgggaatgaagctgcagtaaaggaagatgaagaagaagtttcagataagggcagtgattctgaagaagaagaaaccaatagagattcccaaagtgagaaagatgatggtagtgacagagactctgatagagagcaagatgaaaaacaaaacaaagatgatgaagcagagtggcaagaattacaacaaagcatacagcgaaaagagagagctctattggaaaccaaatcaaaaataacacatcctgtgtatagcctttactttcctgaggaaaaacaagaatggtggtggctttacattgcagataggaaggagcagacattaatatccatgccatatcatgtgtgtacgctgaaagatacagaggaggtagagctgaagtttcctgcaccaggcaagcctggaaattatcagtatactgtgtttctgagatcagactcctatatgggtttggatcagattaaaccattgaagttggaagttcatgaggctaagcctgtgccagaaaatcacccacagtgggatacagcaatagagggggatgaagaccaggaggacagtgagggctttgaagatagctttgaggaagaagaggaggaagaagaagatgatgactaagcagtactctgaatggaccacagtgtttgcacatatttgcaattttttgctgttttggaagtgtatcataaaccagaaacagtacagaactgatgttgagggaggtgtagtttttttactcttgaaatgggtgcataatataactaggcagtggcggtgccttggtacaacctgaaaaatgttaaggcttattgaaacctttcaagtaggggatggtacatttatttcatctgcaaatgataataaatcctttgttattataactgtccagaagtgtgggctatgtattatctgatcagtctatggtcccagtaaaagtaaagatgcaggaaacacagtctgtaaatgagcgacttttctttgttcagctttagttttagcaaacaccacaaatatgttttaagtaacatcgctcaagtttaagtaacatcgctcaagttgataatctcttgataagctctgttgttgacattttgcagtgatacaacagctccactcatagatttaaacttttatttttacttatcttggtcataagttggcattctctcacattccacatgatatagagggctacgttttggaattttccttttcttaattgcccagagttatcagacagattataaaaatggcttttaatggcttaaaccatttctaaacctctatcttagcagatcaatgcaggatctaattcttttgataagttctagctctaaaagtgatagtgggactgtatgttttctgatactggtggcttatgttattaaaccttttttaaaaaaggttcactctaaaagctgaactacatccttagttttcagtctacttgactctatcaggagctttttaaggaaagtaagtataacatgcaaaggaagctttttttgtattcattttggactcctgtcaataaaaatagaagtttgttgactcgttttatgtttcaatggtgtgtgtctttttactatcaggacataaatagggcaatccacttctttatttttcaactaaagattgaatagtattgtacattactgctaaagtgactgctatttctgtatactgtagaaaaacccaggagtgagagggatttcccctcatagtacaactggaaggatagtgcttgtaaagagtagagatgtgtacatgatgaatcattgagggagggtggatatttttattcctagatatggaggaaacataagtctgtagtattataaaactgattgtaataattctttcctatcaaaatctccataggtcaaaatattgttggaatactaaaatttgcaaccttgtttactttaaaaggttgccactttcagtgcagaatactaccggcatcttgttactgcaatagttggaaataaaatgtgaaaattaa

SEQ ID NO: 240 - DNA, 2673 bp, Homo sapiens
attgtgggattggatgagtctcaagatggacaaccgggatgttgcaggaaaggctaaccggtggtttggggttgctccccctaaatctggaaaaatgaacatgaacatccttcaccaggaagagctcatcgctcagaagaaacgggaaattgaagccaaaatggaacagaaagccaagcagaatcaggtggccagccctcagcccccacatcctggcgaacgccccgaccagtgcgcccagcgcccctcccagcacacccacccccagcgctgggaagaggtccctgctcatcagcaggcggacaggcctggggctggccagcctgccgggccctgtgaagagctactcccacgccaagcagctgcccgtggcgcaccgcccgagtgtcttccagtcccctgacgaggacgaggaggaggactatgagcagtggctggagatcaaagtgtgtctcaccaagacagtgagaccgactcccccctcgtcatggtgttttgtgcctggactcgggacgcccgacagcctcctgcatctcacactcttctccccccaccccctctgtcgttgtggtccatagagagagtgtgcctattgactgtggggtgtgtgagttgaaccccagtactgacagcctccttaaagtttcacccccagagggagccgagactcggaaagtgatagagaaattggcccgctttgtggcagaaggaggccccgagttagaaaaagtagctatggaggactacaaggataacccagcatttgcatttttgcacgataagaatagcagggaattcctctactacaggaagaaggtggctgagataagaaaggaagcacagaagtcgcaggcagcctctcagaaagtttcacccccagaggacgaagaggtcaagaaccttgcagaaaagttggccaggttcatagcggacgggggtcccgaggtggaaaccattgccctccagaacaaccgtgagaaccaggcattcagctttctgtatgagcccaatagccaagggtacaagtactaccgacagaagctggaggagttccggaaagccaaggccagctccacaggcagcttcacagcacctgatcccggcctgaagcgcaagtcccctcctgaggccctgtcagggtccttacccccagccaccacctgccccgcctcgtccacgcctgcgcccactatcatccctgctccagctgcccccgggaagccagcctccgcagccaccgtgaagaggaagcggaagagccggtgggggcctgaagaggataaggtagagctcccacctgctgaactggtgcagagggacgtggatgcctctccctcgcctctgtcagttcaggacctcaaggggctcggctatgagaaggggaagcctgtgggtctagtgggcgtcacagagctttcagacgcccagaagaagcagctgaaggagcagcaggagatgcagcagatgtacgacatgatcatgcagcacaagcgggccatgcaggacatgcagctgctgtgggagaaggcagtccaacagcaccagcacggctatgacagtgatgaggaggtggacagcgagctgggcacctgggagcaccagctgcggcgcatggagatggataagaccagggaatgggccgagcagctgacaaagatgggccggggcaagcacttcatcggagacttcctgcctccagacgagctggaaaagtttatggagaccttcaaggccctgaaggagggccgtgagcctgactactcagagtacaaggagttcaagctgactgtggagaacatcggctaccagatgctgatgaagatgggctggaaggagggcgaggggctgggctcagagggccagggcatcaagaacccagtgaacaagggcaccaccacagtggacggcgctggcttcggcattgaccggccggcggagctctccaaggaggacgacgagtatgaggcgttccgcaagaggatgatgctggcctaccgcttccggcccaaccccctgaacaatcccagacggccttactactgagtgttctggaaatacatactttctgaatgaccaaccgtccctcgactgtggaatgttccggcctgcatttctgcccaccccttccgttgtcacgagtgccgtgccgtgtaataaagtcccagtgctcatccaccacagatgcctggtcctgttgcaggaagcccctcctgttagcagcgggatgcaagatgctgtctcggggctctccttattggcctgtggagtctccatccccgctcagcctgggttgcactggaggggaggaagaaagttgttttcagcatagtaaagctggaaggccaggtgcagtgtctcacccctgtcatcccagcactttgagaggccaaggcgggcggatcactggaggtcaggagtttaagaccagcctggccaacatggtgaaatcctgtctctactaaaaatataaaattagctgggcatggtggtgcacacctgtcgtctcagctactcgggaggcagaggcaggagaatggcttgaacctgggaagcggttgcagtgagccaagattgcgcctttgcactccagcctgggcaagagagcaagactctgtctcaaataataataataataataaagctggagacttggccacacctgggctaaaggaa

SEQ ID NO: 241 - DNA, 2540 bp, Homo sapiens
cgccgcctccctcccgcacagcagccgccagcgcggcctcctgcaccatgtcggtggccggcctcaagaagcagttccataaagccactcagaaagtgagtgagaaggttggaggagctgaaggaaccaagctagatgatgacttcaaagagatggaaaggaaagtggatgtcaccagcagggctgtgatggaaataatgactaaaacaattgaataccttcaacccaatccagcttccagagctaagctcagcatgatcaacaccatgtcaaaaatccgtggccaggagaaggggccaggctatcctcaggcagaggcgctgctggcagaggccatgctcaaatttggaagagagcttggagatgattgcaactttggcccagcacttggtgaggtcggggaggccatgcgggaactgtcggaggtcaaagactctttggacatagaagtgaagcagaacttcattgaccctcttcagaatcttcatgacaaagatcttagggaaattcaacatcatctaaagaagttggagggtcgacgcctggattttgattataagaagaaacgacaaggcaagattccggatgaagagcttcgtcaagctctagagaaatttgatgagtctaaggaaattgctgagtcaagcatgttcaatctcttggagatggatattgaacaagtgagccagctctctgcacttgtgcaagctcagctggagtaccacaagcaggcagtccagatcctgcagcaagtcacggtcagactggaagaaagaataagacaggcttcatctcagcctagaagggaatatcaacctaaaccacgaatgagcctggagtttccaactggagacagtactcagcccaatgggggtctctcccacacaggcactcccaaaccttcaggtgtccaaatggatcagccctgctgccgagctctgtacgactttgaacctgaaaatgaaggggagttgggatttaaagagggcgatatcatcacactcactaaccaaattgatgagaactggtatgaggggatgctgcatggccattcaggcttcttccccatcaattatgtggaaattctggttgccctgccccattaggatgttatgctggctggctcgcctcctcttgacccagatagttacggttaaccactgctttggcaatgctgcttataacacatcccaagtgcaggccgcagtggtccacgtcatccagccccaccaagtgactttggttgacttgtgggctcccacaggagtcatggtgatggatgatatcctcttagcctggtgggcgtggcatgtgctttttaaaacatcatctgagaccagccagtagtcacagaactgctgtttacacagttctcaggaggctgtggtttattagaatatgaccatgagccatttcacagaaaaaccatcccaccgaagatattgtctatcaccccaggggccatctgaaggtctctttgcatttctccatgcaaagaggagaaagcttttgctttcacactgtcccttcccaaatatgtgagtcatggaattgtcaaagtaagccttccctcaccagcaaattgtctcctgatctgaatgaatttgtctcttaatgcatccatagaaaagtgttaattgtgggttcaaagcattctctgcaaataggcatctcagctcctcacacttatggctatttctgacgtatagccagttttcttccctccttgctattaaagccagagtcgtaattccaaattatttttcagtaagacagttaatcagcattattgtgagagggactgaaaagaaattctccattatgaggaattgggaagaaatctggtatccaagcttaaatttcttgctatacagaactatgtatgtatttaggctattctgaagggcacagggaaggggaacaaatatcttcacttcagttttatttgtgaattacatgtttcatgaatccatttggcacagagacacaaggaagaaaacactagtaaccaactttccactagttcatatactgagaaacagtaaatacctttcctttccacttttaccctgtgttctttgaacatcatttgtgcagattctgccctcaatgaggaccaaataaagatgatttttgtgcttagcagtttaaggtatatggctggcatatgcaaaactctttcccaattcagtcgctacttttacttctgccctttctatccatcgtcttcattttgtgtgtacagtgctgtgtgtaagcttatcagtgtgtttttttatttgtatcagtcatgaaagtcctgttaggtatccagagttctatttatctagctgtacagactctttcagaggtttaacgtgctgcttccgatgtgccacctgcagtagtggatcatgtggagtgaaaggcaaatcttactgcttaatgtataaactctcaccacaggaagcatcgctgtttccaataaatattgctgaagacagaaaaaaaaaaaaaaaaaaaaaaaaaaaaaaaaaaaaaaaaaaaaaaaaaaaaaaaaa

SEQ ID NO: 242 - DNA, 1942 bp, Homo sapiens
gcaacttgaattggtcccagctgctcccagaagaacgggcgggttggtccctatgccacccctggagagctactcgccgcccactttgccgtgaagggctgtgcggttcccgtgcgcgccggagcctgctgtggcctcttatgcactccaccacccccatcagctccctcttctccttcaccagccccgcagtgaagagactgctaggctggaagcaaggagatgaagaggaaaagtgggcagagaaggcagtggactctctagtgaagaagttaaagaagaagaagggagccatggacgagctggagagggctctcagctgcccggggcagcccagcaaatgcgtcacgattccccgctccctggacgggcggctgcaggtgtcccaccgcaagggcctgccccatgtgatttactgtcgcgtgtggcgctggccggatctgcagtcccaccacgagctgaagccgctggagtgctgtgagttcccatttggctccaagcagaaagaagtgtgcattaacccttaccactaccgccgggtggagactccagtactgcctcctgtgctcgtgccaagacacagtgaatataacccccagctcagcctcctggccaagttccgcagcgcctccctgcacagtgagccactcatgccacacaacgccacctatcctgactctttccagcagcctccgtgctctgcactccctccctcacccagccacgcgttctcccagtccccgtgcacggccagctaccctcactccccaggaagtccttctgagccagagagtccctatcaacactcagactttcgaccagtttgttacgaggagccccagcactggtgctcggtcgcctactatgaactgaacaaccgagttggggagacattccaggcttcctcccgaagtgtgctcatagatgggttcaccgacccttcaaataacaggaacagattctgtcttggacttctttctaatgtaaacagaaactcaacgatagaaaataccaggagacatataggaaagggtgtgcacttgtactacgtcgggggagaggtgtatgccgagtgcgtgagtgacagcagcatctttgtgcagagccggaactgcaactatcaacacggcttccacccagctaccgtctgcaagatccccagcggctgcagcctcaaggtcttcaacaaccagctcttcgctcagctcctggcccagtcagttcaccacggctttgaagtcgtgtatgaactgaccaagatgtgtactatccggatgagttttgttaagggttggggtgctgagtatcatcgccaggatgtcaccagcaccccctgctggattgagattcatcttcatgggccactgcagtggctggacaaagttctgactcagatgggctctccacataaccccatttcttcagtgtcttaacagtcatgtcttaagctgcatttccataggatagaggctattgcagggagtggcttgtatcatttcagatttgcaactgaagtttctaaaaacatgtgtaaatacatagaatgtatactgttcttattttttttaatcaccgtttgttttgtgctttctagttaacctgatgccagtacagtgcaattggaaaagcaggactttggtgcctgtgctataagcagcagattttgtgggaggaaacacttgagaggcgatattgtcaacagtatttgaagggtgttagcagaataaaagacagctttagtcagccgtgtcattataaagcatgttgtgtggcctcacagaaacattgaaactgtttatacagcaaaagtcaggtattagcagcactaaagcaaatatcactcagatgaaacaaagcagtgaaaccctacagtttaaatgatgtcacttttagtgctgttggcaagaaaaaaaaaaaaaaaaaccaaaaaaaaaaaaaaaaa

SEQ ID NO: 243 - DNA, 3394 bp, Homo sapiens
ccgcgcgtgtggcagtcgcggaaggcgcgggagcttgcgtgctgctgggcctgagctgtctgtctcgtttctgtccgcgcgccctgcatcccggccccgggcgcccgctggaggtcgccgaggagccacagggctgactggtctgctgcccgggcccaggagtgcctggtgtagcagtcgcggagccatcccggcgtctgctgccatgaccgactctcccctcagaggagactcttcctcagcggtggctgcagagacagatgagcggcggctcctggccgcgggaccgtgagacgggttcgtggccggccatttagggggacgctgcgaccaccgcctgcgcccctccggactggttccttgggccccggaagctcgcggcgggccctgcgggaggcggcatgctcccgcggaggctgctggccgcctggctggcggggacgcggggcgggggcctgctggcgcttctggccaatcagtgccgcttcgtcacgggcctgcgcgtgcggcgcgcgcagcagatcgcgcagctctacggccgcctctactccgagagctcacgccgcgttctcctcggccgcctctggcgccggctgcacggccgtcctggccatgcctctgccttgatggcggcgttagccggcgtcttcgtttgggacgaggagaggatccaggaggaggagttgcagagatctattaatgagatgaagcggttggaagaaatgtcaaatatgtttcagagctctggagtccagcaccaccctccagaaccaaaagcccaaacagaagggaatgaagattcagagggcaaagagcaacgttgggaaatggtgatggataagaaacactttaagctgtggcggcgcccaattacaggcacccacctttaccagtaccgagtttttggaacctacacagatgtgacacctcggcagttcttcaatgttcagctggacacagagtatagaaaaaaatgggatgccctggtaatcaagctggaggtgattgagagggatgtggttagtggttccgaggttcttcactgggtaacccattttccttatccaatgtactcacgggattatgtttatgttcggcggtatagtgtggatcaggaaaacaacatgatggtgttggtgtcgcgtgctgtggagcatccgagtgtgccagagtctccagaattcgtcagggtcagatcatatgaatcccaaatggttatccgtccccacaagtcatttgatgagaatggctttgactacttactaacatacagtgacaatccccaaacggtgtttcctcgctactgtgttagttggatggtttccagtggcatgccagatttcctggagaagctgcacatggccactctgaaagccaagaatatggagattaaagtaaaggactacatctcagctaagcctctggaaatgagtagtgaagccaaggccaccagccagtcctctgagcgaaagaacgagggcagctgtggccctgctcggattgagtatgcttgacaggctttgggataagaagggacaaggtgcttctagccctgtctcagtccgttatcactctgctgtagaagggggacatgccacatgtattagaaggcatctgctgtaacttccagtgcaagataattcaataactgatgtcccatttcattcagagcccttattgctcttatcaaaacagaagaaggctacatttgtgggagtgttgtcatattctcaggccaactgttttgaaattcggtatctcactgagctaatctggaacaaacctctcacctcaggccagaaggggatgacctccatttgcttctctgagtagtttcctctgctgacattccaaatcccaccatcgattgtgcagcgctttggatttccttcagttctccaggtccacctggaaagtatagttggccagttgagtctctcaaatgaggggctactgggagtgctcttggtaacaatcatgatgtgaatgggtgtgaacgatacttggctatgttaagtgccttgtccgcaccttgcttttatctctagagacatgaagttattattaattttttttttttttaagtagagatggagtttcactctgtttcccaggctggtcttgaactcctgggccatgcctggccagggacatgaatttgtacaaagaaatttccctccctgcctgcacaatatcacccattgactcaccttatccaaagcaagtttcctgtgaatcggccagttcttctatattcattggatcattgcctccttcctaaccttccccatttaccaagaacactgggagactaatccttttagatagtagctttttgatgctcaaaacatcacatttaaatttagtttaaaaattttttaacttttgtgtcaaataggagttgaggaattgagcaggattctaccctagtccgattgtatagaaaacaccattttgattcaggtattatttttcatatttcaggtttgacttgttcttttcagaaggctaaagtcagaggaatgggggctgggccactcccttggagctctcagatctacagacaagctgtgtgaatgcatagatgtaatcttgtctcaaatactaatacagtggagatttggtttatgttaccattaagttcctctaaaaagtttttcttcctctcttcagagccaaaataaaagtgaactacactgttcagataaggtcacaatctgatgctgtcagtttgaccgagctggttttgcttatggtcatgctgcaatttgttagaataatagggatcaagttttaaatcctcctccttcccttttttctggagtcttgagggccagagtttttgtttttgtttttgtttttgttttcctgcttgctactgttttgtggtgttgaaaagtggtttaaacctgagactaacttaaacacttccttgaccttcttgttgcctgttcatttttgtgccaaggaagtagctgccccagtgtatgtcttgccttctccgcgtcattgttggaagaggagagatgcatcgagcagtcccagctgcttttcatttattacttcttctttccaggacctgacagaagtcagggaagagtccctgggttatgtccaaacttagcacctgcaattgttgggatgtggatggatgtgtgcataagagagagagagaatatgtgtgtgtgtgtgtgcgtctgcgagcgcacacacatgcacaagtgcgaaggagttgcggttgctccatgttctgacttagggcaatttgattctgcacttggggtctgtctgtacagttactcatgtcattgtaatgatttcactcctaactgtgacatttttatcaaatgtgtgaataaatacataaagattggtacaaaaaaaaaaaaaaaaa

SEQ ID NO: 244 - DNA, 4344 bp, Homo sapiens
gctgaggagaaagcggcgcgcggagggtgtgagatggcagacaggtttgcaggaaaccctcagaaagggggctggaggatttagccactctgtcctccccttccggcagtccagggcctcctcccgagcacagcggcgctatggactctccaggatacaactgcttcgtggacaaagacaagatggacgctgccatccaggacctggggcccaaggagctgagctgcactgaactgcaggaactgaagcagctggcgcgccagggctactgggcccaaagccacgccctgcggggaaaggtgtaccagcgcctgatccgggacattccctgccgcacggtcacgcctgacgccagcgtgtacagcgacatcgtgggcaagatcgtgggcaagcacagcagcagctgcctgccgctgcccgagttcgtggacaacacgcaggtgcccagctactgcctgaatgcacgcggcgagggggccgtgcgcaagatcctcctgtgcctggccaaccagttccccgacatctccttctgccccgccctgccggccgtggtggccctgctgctgcactacagcatcgacgaggccgagtgcttcgagaaggcctgccgcatcctggcctgcaatgaccccggcaggaggctgatcgaccagagcttcctggcctttgagtcgtcctgcatgacgtttggggacctggtgaacaagtactgccaggcggcccacaagctgatggtggccgtgtcggaggatgtcctgcaggtctatgcggactggcagcgctggctgtttggggagctgcccctctgctacttcgcccgggtctttgacgtcttcctggtggagggctacaaggtgctgtaccgcgtggcgctggccatcctcaagttcttccacaaggtgagggccgggcagccgctggagtcggacagcgtgaagcaggacatccgcacgttcgtcagagacatcgcgaagacggtgtcccctgagaagctgctggagaaagcgttcgccatccgcctcttctcccgcaaggagatccagctcctgcagatggccaatgagaaagccctgaagcagaagggcatcaccgtgaagcagaagaggcagtttgtacacttggccgtccatgcagagaacttccgctcggagatcgtcagcgtgagggagatgagagacatctggtcctgggtccccgagcgctttgccctgtgccagccccttctgctgttctcctccctgcagcacgggtacagcctggccaggttctacttccagtgtgaaggacatgagcctaccctcttgctcatcaagaccacgcagaaggaggtgtgtggtgcttacctgtccacagactggagtgagagaaataagtttggaggcaaactgggcttctttgggaccggagaatgctttgtgtttaggctgcagcctgaggtgcagcgctacgagtgggtggtgatcaagcaccccgagctgaccaagcccccacccttgatggctgccgagcccaccgccccactcagccactccgcctcctcagaccccgctgaccgcctctcgcccttcctggccgctcgccacttcaacctgccctccaagaccgagtccatgttcatggcggggggcagcgactgcctcatcgtcgggggaggaggcggccaggcgctctacatcgatggggacctgaaccggggccgcacaagccactgcgacaccttcaacaaccagcccctctgctccgagaacttcctcattgctgccgtggaggcctggggcttccaggaccctgacacccagtgacggcctgtgccacggtgactgagccgtggtggggcggtgggccgaggctgggctgccgcctcgggcagcagagagcagatgaaacccccatgtggtaggcagggttgggggacggcaggaccccatggccaagcctggcgttgcctggacctgctgctgcctctacctggggtttgggctgggcttccccagtccacctgcatctgggtcagagctggagggcctgctgtgcccccagccccacccagagctggcataggaagtaccttcctcctccgtggaggcttccatagcccaaggccttgggagtgtctgggtcttgctgcccctgagcctctctaggcagcctgagcccctggggtgggagtacaacggcagtgggaacgtgcagctaagggtgggcctgtggtgccccctgctggtgccgcatagcatcgcgccctcctgagcagggccctgcagcctggctggctggcgactgaatcccagcgtagatcccgagaacagactggcacccttgggcctgccccctggcggaccccaccccctgtcctgggcgtttgccccagttccctccccaggcctcctgggccacctctcacattaacccttcttggctgcctctgaggctcccctgggctgcgtttgggagctgctgggtgggaggaggagggtgggatttgtgctgggctccacccccagggagggtgggagctggagggggatgtcacatgtccttgtgtttctgcagagcctgaagcttttgctgggcctccctgcgtgttcccatctgaagaggtagccccgggaaaggccctcagggaccgacccagaccagcaagctccatttccaggggtctgcccagagaagcctggacccagggggcttctcagctcccctcccttccagcccaggcctccttgagctcctgtagcctctgcagctgcccatttcacctctttgtcattgcaatgacctggggcccagggtcacgcccaagcccctctttgtggcatgctcatctcagtgcagccccaactgcttctctgcaccaggccccgtgccctcccctggccctggccacacagcacctccttggccaccttgcatggatgcatgtcctccctctgtccctcttgtggtgctgtggctggccacgtgtcagggttttctgtgagcctctcaccttacagcctttgggcccctgggcccctgccctgcctgagccctgcgctggccagacgcaggtaggtgccaggggaggccttgcctctgggcactatagggggcagccccctgccttgtgacctccctccatgccccatgacctccttcaactcgtcttgagggtctggtcaccacggaggggagaagggagacacagaggcccaagtggctgttctgggaccatggaagcctgggtcacagaggcaggtaccagcagtcctgcccccacccccgtccctgctggcctccagccagtgccacttggagtcccctgcaccgtgccactttccatccccacaccattgcctgctcctcccatggggctttagcctcccctgaccatctgctcatgtagcctctgactgggcgcacagtggtgcaggaggaaggaccgggaaccctgtgtggctttgggcaagctgacaaacccgtctggaactcagtttccccagctgtgaaatggggccagtccccatgccctgctgtcctcctcacaggactgttgagaggctcgcagggggatggggtgaatccctctcacggggagaggtatgggagggaagtcgccactcatctcagcccaccgcagccctccaggcccccgcctgagcccctgaggccctcatctgtaccgccagctttggtgttcattaaacatggtcttgctgcatcaactccagggctccaagctgagtctgatctcttcagccagaggggcctccgggggcttcctgggcctacagccaagcaggtgtgggaggctgcccgctgtagtgctcacccacattctatgactggaatgctgcaagcctcttccagagggagccctccaggagcagggaagtcatatccgtggaccatttgtaggtttccctctgcaaacttcctgaactgggtggtgatttttctggcgagttaagtccagcaggttctgcgtggctgcccccagggggccccacccgggccttccagtgatctggaccaggaagacggattgctgctgggtcatgatttccacatcatgagcgaagttctttgttttttgtgtgcatgcaaaatattgtttctttaaatttaatatcttttcctaacttttctactaacctagaaggtatgtgtgattattatcttttttattcttatcactgtacttgttagtatctgatattaggtattcccaaatagaacataatttattttgttaatgttctctatttcttcttgattatttattagctttggatgttaaaaattagccaaaagtggctgctctgcctatgaagtagccattctttgtttaaaaaaaaaaaaaaa

SEQ ID NO: 245 - DNA, 2299 bp, Homo sapiens
agcgggcggctgctaggaggcaccgaggcagcggcggggctctgggcgcgcggctggatgcccccggcctgcggctccctgcgcttcccgccgtccaggggcaccagtcatgggcgccgcagccgctgaggcgccgctccggctgcctgccgcgcctccgctcgccttctgctgctacacgtcggtgcttctgctcttcgccttctctctgccagggagccgcgcgtccaaccagcccccgggtggtggcggcggcagcggcggggactgtcccggcggcaaaggcaagagcatcaactgctcagaattaaatgtgagggagtctgacgtaagagtttgtgatgagtcatcatgtaaatatggaggagtctgtaaagaagatggagatggtttgaaatgtgcatgccaatttcagtgccatacaaattatattcctgtctgtggatcaaatggggacacttatcaaaatgaatgctttctcagaagggctgcttgtaagcaccagaaagagataacagtaatagcaagaggaccatgctactctgataatggatctggatctggagaaggagaagaggaagggtcaggggcagaagttcacagaaaacactccaagtgtggaccctgcaaatataaagctgagtgtgatgaagatgcagaaaatgttgggtgtgtatgtaatatagattgcagtggatacagttttaatcctgtgtgtgcttctgatgggagttcctataacaatccctgttttgttcgagaagcatcttgtataaagcaagaacaaattgatataaggcatcttggtcattgcacagatacagatgacactagtttgttgggaaagaaagatgatggactacaatatcgaccagatgtgaaagatgctagtgatcaaagagaagatgtttatattggaaaccacatgccttgccctgaaaacctcaatggttactgcatccatggaaaatgtgaattcatctattctactcagaaggcttcttgtagatgtgaatctggctacactggacagcactgtgaaaagacagactttagtattctctatgtagtgccaagtaggcaaaagctcactcatgttcttattgcagcaattattggagctgtacagattgccatcatagtagcaattgtaatgtgcataacaagaaaatgccccaaaaacaatagaggacgtcgacagaagcaaaacctaggtcattttacttcagatacgtcatccagaatggtttaaactgatgacttttatatgtacactgaccatgtgatgtacatttattatgtctttttttaaagaatggaaatatttatttcagaggccttatttttggacatttttagtgtagtactgttggctcgtatttagaatattcagctacgacagttttggactgtttagtagtctttgttttatgtttttaaatacagaaattgctttcacaaatttgtaccacatggtaattctaagacttgttctttacccatggaatgtaatatttttgcaaagatggactacttcacaaatggttataaagtcatatccacttcttccacaatgaccacagcaaatgaccaagcatgaactaaaggtaaagatgtttacagattacttttcttacaaaaaaatctagaagacactgtgtttaaatagatatttaaatgtttttgagatttagtaactgattttttagacactgcctatcgcatgaactgtaaagctgtgtgtattaggtgtaaaatatttataagatatatggactggggaatttgattattcctccctttgaaaaaatagtcctaataatttgaacaaatatgttagtaatgatggaacagatcaatgaaaagtagatatagatattgtgaaaataggctgtttaacaaacagattggaataaagcctattctaccagttaaactactttaatacacattcatttttaaagaaaatgtttgttttaacataaataaacaaatcgtatcagtgtttgtgaataaaatacaaaaatgattgttaatgattggtgctcttaaagtgagcttaaaatttatccaagacgtatatccaaatttgtcctgtagtaatagattaatattcatagattgttggtgtttaaagatctgaagtgtgagtagaatgtattcagctgtttaacatgtagtttagatattcaaaagtatgcatgtagaatttaaagaatatgttaaaaattattaatcttaatattttgtttggaaaagcatgttataatataatgttttcacaaaaaaaaaaaaaaaa

SEQ ID NO: 246 - DNA, 5100 bp, Homo sapiens
gttagctgagcaactgggccgaagagaagatgaggcaaaaattcgccatggccttggcctctccctttgggctagtggaaacttggaggaggcccaacaccagctttatagggcatcagccttgtttgaaacaatccgacatgaggcacagctgagcacggactacaaactctccctctttgacctgcagacatcatcctaccaggccttgcagcgggtgctcgtcagcctaggccatcatgatgaagccctggctgtggcagaaaggggacggacaagggcatttgctgatcttctggtggaacgacaaacaggacaacaagactccgacccctactccccagtcactattgatcagatcttagagatggtaaatggccagaggggactagtgctttactattccctggctgcaggctatctgtatagctggctgctggctcctggggcaggaattgtgaagtttcatgaacactacctgggtgagaacacagtggaaaactcaagtgacttccaggccagcagcagtgtaacccttccaacagcaaccggctcagccctggagcagcacattgccagtgtccgggaggccctgggggtggagtctcactactcaagggcctgtgccagcagtgagacagagagtgaagcgggagacatcatggaccagcaatttgaagagatgaacaacaaactcaactcggtcactgaccccactggctttctgcggatggttcgccgcaataacctgtttaacaggagctgccagagcatgacgagcctgttcagtaacactgtgtcaccgacccaggacgggacctcctctcttcccaggaggcagagctcgtttgccaagcccccgctccgtgccctgtatgacctgctcatcgcgcccatggaagggggcctgatgcactccagcggccccgtgggccggcaccggcagctcatcctggttctggagggggagctctacctcattcctttcgccctcctgaagggaagctcctccaatgagtacctctacgagcgcttcggcctccttgctgtcccttccatccgctccctcagcgtgcagtccaagtctcacttacggaagaacccgcccacatactccagctccacatccatggcggctgtcatcggcaaccccaagctaccatcggccgtgatggacaggtggctgtgggggcccatgccatcggccgaggaagaggcctacatggtgtccgagctgctgggctgccagcccctagtgggcagtgtggccaccaaggagagggtcatgagtgccctgacccaggctgaatgcgtccactttgccacccacatctcctggaagctgtcggccttggtcctcacgcccagcatggacggcaaccctgccagcagcaagagctccttcggccacccctacacgatccctgagtccttgcgggtgcaggacgatgccagtgatggggagagcatctcggactgcccgcccctgcaggagctgctgcttactgccgccgacgtcctggacctgcagctgcctgtgaagctggtggtgcttggctcctcccaggagtccaacagcaaagtcacagccgacggggtcatcgcgctgacaagggccttcctggctgccggcgctcagtgtgtcctcgtgtctctgtggcctgtgccagtggctgcttctaagatgttcatccatgccttctactcatccctgctgaacggcctgaaagccagcgccgccctgggggaggccatgaaggtggtgcagagcagcaaggccttctcgcacccctccaactgggcagggttcatgctcatcgggagtgacgttaagctgaacagcccctcatcactcatcggccaggccctcacagagatcctgcagcacccggagcgtgcgcgggacgccctgcgagtgctgctgcacctggtggagaaatccctgcagcgcatccagaatgggcagcgcaatgccatgtacacatcccagcagagtgtggagaacaaagtgggcggcatccctggctggcaggccctcctcaccgctgtgggcttccggctggaccccccaaccagtggcctgccagcggctgtcttcttcccaacctccgacccgggcgaccggctccagcagtgcagcagcacactccagtccctgctgggtctgcccaatcctgccctccaagccctttgcaaactcatcactgcctccgagacgggcgagcagctcatcagccgggctgttaaaaatatggttggaatgctccaccaggtgctggttcagctccaggctggcgagaaggagcaggacttggcatcagctcccattcaggtctccatcagcgtccagctgtggcggctcccgggatgccacgagttcctggcagctctaggttttgatctctgtgaagttggtcaggaggaagtaatcctgaaaaccgggaagcaagctaatcgacggactgtgcacttcgcgctccagtccctgctgtctctgtttgattctactgagctacccaagcgcctcagccttgacagctcctcctccctcgagtctcttgcttctgctcagtctgtttccaacgccctgcccttgggttaccagcaaccccccttctctcccaccggtgcggacagcatcgcctcagatgccatctctgtgtacagtctgagctccattgcctcctcaatgagctttgtctccaaacccgagggtggatcagagggtggaggccccggaggacggcaggaccatgaccggtccaagaacgcttacctgcagagatccaccctgcctaggagccagctgcctccccagacccgccctgcaggcaacaaagatgaagaagaatatgaagggttttctatcatcagtaacgagcccttggcgacctaccaagaaaaccgaaacacatgcttctcaccagaccacaaacaaccccaacctgggacagccggaggcatgagagtctcggtgagctccaaagggagcatcagcactccaaattctccagtgaaaatgactctgattcccagccccaactcacccttccaaaaggtgggaaaactagcaagctcagatacaggagaatcagaccagtctagcacagaaacggacagtaccgtgaaatcccaagaagaaagcaacccaaaactggatccacaagagttagcccagaaaattctggaggagacacagagtcatctcattgcggtggagcgtcttcagaggagcggcggccaggtgagcaagagtaataaccctgaagacggcgttcaggcgcccagcagcactgctgtcttcagagcgtcagaaaccagtgcgttcagcaggcctgttctctcccatcagaagagtcagccatcaccagtcactgttaaaccaaagcccccagccaggagctcctccctgcccaaggtgagttccggatatagcagccccaccacctcagagatgtccatcaaagacagcccgagccagcacagtggccggccatcgcccggctgcgactcacagacttcccagctggaccagcctctctttaaactgaagtaccccagctctccttacagcgctcacatttccaaatcaccaaggaacatgtccccaagctccggccaccagtctcctgctggcagtgcaccctccccagctctctcctactcctcagctggatctgctcgctcaagtccagcagacgctcccgacatagacaaactgaaaatggcagccattgatgaaaaggtgcaggctgtccataacctgaagatgttctggcagagcacaccccagcattccacagggccaatgaagatcttccggggggctcctggcacgatgacttccaaaagggatgtcctcagtctgttgaatttgtcaccacggcacaataagaaggaggagggagtggataagcttgaactgaaggagctgtccctgcagcagcatgacggagctccaccgaaagcccctcccaacggacactggcgcaccgagaccacctcgctgggctcactgccgctgcccgccggccctcccgccacagcccccgcgcgccctttgaggcttccttctggaaatggctacaagttcctgtctccaggaagatttttcccttcttccaaatgctaaagcatcttttatacccactgactctgagcagcctgcagatgggggcctggcgtttgcttcagcccttccctgagtgcagtccccccacagccaccagcaccctcatgatgctgtgctctgcaggcgaggggcaccaccacgtccaaaggctgccacacacactggtggcttttctgggccacattcaccaaaagccaggacttctgtggggctggtacaggaggctcatggaatttcctacacacttcaccaaatgtttgtttacctttgaactccctgcttctcatctttgatatgattcttcaccaggattttgtacaaaaatgatcatggttctggggtggggagaggaaagggagcacatattttgctaagaggtatatatgcagtaccttttatacacagaaatacaaatagagctttttctaaggctttcggttgctggttgggggtgggatatatgaaatttcagttgaattctacaggaaagtgttatattagccaaaaacagaaaaatggtttttaaaatgccaatgatttgtaattaaattgtagcaattttggtctcatgatagtgtaatatctcagcaacaatgcaataattcacattgaaacagcgcttccattctgaactctgctctgcaaatgtcttttgggtcccgctgtcaaccaaacttgaattttcttaaaaaaaaaattatgtaactcttatccaggcattttagaactatgcaattgtgatttaaaatgcaactttgtgcttttaaaacattattgaccttttttgtatatggataaacaacttggttttattatcaatagtactttgcatttatagctattatttttaaaagctcaaaaagttttttaaaatgtcaaattttgaatagtcatcaataagtaattatcaagtttggaaggaaaggttgaaatgactccgtttccttataagcaaaaaaaaaaaaaaa

SEQ ID NO: 247 - DNA, 4862 bp, Homo sapiens
aggacccggaagtgagggtgtgagaggcctctctggaagttgtcccgggtgttcgccgctggagcccgggtcgagaggacgaggtgccgctgcctggagaatcctccgctgccgtcggctcccggagcccagccctttcctaacccaacccaacctagcccagtcccagccgccagcgcctgtccctgtcacggaccccagcgttaccatgcatcctgccgtcttcctatccttacccgacctcagatgctcccttctgctcctggtaacttgggtttttactcctgtaacaactgaaataacaagtcttgatacagagaatatagatgaaattttaaacaatgctgatgttgctttagtaaatttttatgctgactggtgtcgtttcagtcagatgttgcatccaatttttgaggaagcttccgatgtcattaaggaagaatttccaaatgaaaatcaagtagtgtttgccagagttgattgtgatcagcactctgacatagcccagagatacaggataagcaaatacccaaccctcaaattgtttcgtaatgggatgatgatgaagagagaatacaggggtcagcgatcagtgaaagcattggcagattacatcaggcaacaaaaaagtgaccccattcaagaaattcgggacttagcagaaatcaccactcttgatcgcagcaaaagaaatatcattggatattttgagcaaaaggactcggacaactatagagtttttgaacgagtagcgaatattttgcatgatgactgtgcctttctttctgcatttggggatgtttcaaaaccggaaagatatagtggcgacaacataatctacaaaccaccagggcattctgctccggatatggtgtacttgggagctatgacaaattttgatgtgacttacaattggattcaagataaatgtgttcctcttgtccgagaaataacatttgaaaatggagaggaattgacagaagaaggactgccttttctcatactctttcacatgaaagaagatacagaaagtttagaaatattccagaatgaagtagctcggcaattaataagtgaaaaaggtacaataaactttttacatgccgattgtgacaaatttagacatcctcttctgcacatacagaaaactccagcagattgtcctgtaatcgctattgacagctttaggcatatgtatgtgtttggagacttcaaagatgtattaattcctggaaaactcaagcaattcgtatttgacttacattctggaaaactgcacagagaattccatcatggacctgacccaactgatacagccccaggagagcaagcccaagatgtagcaagcagtccacctgagagctccttccagaaactagcacccagtgaatataggtatactctattgagggatcgagatgagctttaaaaacttgaaaaacagtttgtaagcctttcaacagcagcatcaacctacgtggtggaaatagtaaacctatattttcataattctatgtgtatttttattttgaataaacagaaagaaattttgggtttttaatttttttctccccgactcaaaatgcattgtcatttaatatagtagcctcttaaaaaaaaaaaacctgctaggatttaaaaataaaaatcagaggcctatctccactttaaatctgtcctgtaaaagttttataaatcaaatgaaaggtgacattgccagaaacttaccattaacttgcactactagggtagggaggacttagggatgtttcctgtgtcgtatgtgcttttctttctttcatatgatcaattctgttggtattttcagtatctcatttctcaaagctaaagagatatacattctggatacttgggaggggaataaattaaagttttcacactgtgtactgtgttttactgattggttggatattgcttatgaaaattccatagtggtatttttttggattcttaatgtgtaacttaaacatactttgaagtggaggagagtcataagacagaacatttggcaggaattgtccttatgaaacaagaaaaagaaaatgaaaagtattattaagcttctgtgtttgtctaaaaatgtggcatatggatggcatttaaaactttgaatgaattatacctaaatctgggacagggaggtgacagtggaacaggctaccaatcagaactagatgacttttaaggctcctcctattatgagacttcaatttccaaagagaagaactagcagagaaattgtatttcagtaattttaagctccttctgtcttgtagagtcttgttatagttgtataaatcaaaaacacagaataaggaacatatttaactttttttcattataaaatggttagaggaccctaccccctctagattccctgatttccccaggcctgcagcatacagtaagatgggtccctgtgccaggcctcaatactgccagggaataaaaccagagggagaggaccctcagtgtcatatcaggaagcccagtgccagaggacagacaggttcaaaactggcttttcctctgggcctgggttggtgctataggccaagggtcattttatacttgggtataaatcaatcccagtttgggaaaagattatttttaagcttaaaaggctgacatgtgccattatatgtagtatgtaatatatgtaacatcttccaattcttttaaaataaaattaatatttataatggatatttaatgattgttatttttaaaaaccagcttataattcctcgttatgcatgatttatccaaagtttccatagttttattcaaaataataaatgttaataaggtgataaggggtatatttaatgtattgtatcaaattgtgaataagaaagtaggatggagctttctagaggttgggccttagttctgttatcctcattgcttttaaccaataagttaaatgaagttagagttatggtcttcaggttagattatggaccagatctgtgagggtcagcatggaaattcacattcaacaaggtagcacacaggaccaagagcagcacatgcaatcaactggaataatatagtaatcctgtaactgggtttgaaaaaataatcaacaaaagatacaattcaagggttaggttgcagagagctggcttgagagtagttattatgaaaaaggcctcaaggagtacgtgttcagtatgctctaagatgataaagtggctgttaaaaagggagttgatttgaggaagtattacttagcattcatgcatattgggcttaggctctagccctgccactatcattgtcttctctggactgtgaagtcactgaggacaaggaaactaaatttaatgtctgtatcactagtgcctagaatttctggacacttagtagtcaccatcaggcgtttatttaatgaatgagaagcaaagtgaccttggttacttttttaccctgaggggctcagcactcattaggacttggtgcctaattttataaaaagtcactaagctcaagtgcttggatgaaaggacagcgtggataaaaaggtttttaaaacatggatgttaaggctgttttgcttggagaagacttgggactgggacagtctttagatattatttgaaatgctggcactgtctatctggatcccagggcttgaactaggatttgaggaagtcacagggaagcagatttcagtctgacatttattcagtgcaagttttttggtgctgtagtatatgatgaaagatgtaaagctgaataaagcattatttctgccctagagttgttcacagcctagtcaggcatatggatatgtaaacaatgactgtaacgtgttatagatgtaaagacaaaataaaggttaaagagggcataaaggagcactcaattgcagagatttgaggacattatttttattttgagctttaaaaagatgaataggtgttctcaggaggtagggatctggctgagagggaataatctgagcaaaggtatgaaacagcctaatgcattagagaaaaaagttcttttagtaaggcatttggggttggggaagctagaaaaagaaatgggagctggtcacacagggccttgtgtgccagactaaggggtttgtagtatatattgtaggcagaagagatccatcaacagattgcaagcaaggaagtatgttcactttaaagtttgagaaagaatagtgtggaagcacgtctcaaatttagacttgttccccctctgaaccgtgaatcagaccatttcaggtagaagtcttccccggtttatctgatctactcggggcctcaggcttctcagctgggaagagaggatgcaagaccagactgaagaacacggttgagtccccagaaccaaaagggggcctttctgcttcttagccagctacctcttcgagtttttcaaattgtgagggggaccataaaaggatggaaacttttagatgacattctacaaattatttttttctttaaattaaaagaacctagccaataagatagagaatgggcatctaaggcatctcagagctctctgatgaagccaggttgtcaaagatcatttgcaaaagaagggaaaactggcatgacaaaagctacagagaggagagtgaaatatagaagtgtttgaaatgttcaagctcacaataagcttaaatttatagaaaatgctaaggttgtcaagaaggcttttttttttttcttttttaaacctgagggcaaaaaggaatggataaagtagtgtaatggattgacaatcaggaagaacagaataactcagttttttttctcctacaaggagatatggctggaccaaaataaaatgacatgaaattgcaaaaatgaaaa

SEQ ID NO: 248 - DNA, 9950 bp, Homo sapiens
acactcctagaatatgcagagaaatggaaaacttcagaagatcctttacctttattggaggtatacacagtggctatccaaagttatgttaaagcccgaccttatcttacctctgaatgtgaaaatgtagccttggttctggaacgcttggcattaagctgtgttgaacttttactgtgtctgcctgttgagttatcagataaacagtgggaacaatttcagacactggtgcagtgttatatttaaagcctgataagcttgcttttaaaaatctgttgtaattctttggatgtttatttaatatttataggtagctcatgaaaagctgatggagaatggcagctgtgaattgcattttttagctactctagctcaagagactggggtgtggaaaaacccggtactgtgcactattctttcccaggaaccattggataaggataaagcttttgagggtcccatcttgttggatatgagaattaaacatctaatcaaaacaaatcagttaagtcaagcaactgctctagcaaagctgtgttctgaccatccagagattggcataaaaggtagttttaagcaaacttaccttgtctgtctttgtacatcatcaccaaatggaaagttaatcgaagagatttcagaagttgattgcaaagatgcactggaaatgatctgtaacttagaatctgagggtgatgaaaaaagcgctcttgttttatgtactgcgtttttgtcacgtcagctccaacaaggagatatgtactgcgcttgggaacttactctcttttggagtaaattacaacaaagagtagaaccatctatacaagtgtaccttgagaggtgtcgtcaactttctttgttaacgaaaacagtatatcacattttcttcctgattaaagttattaattcagagactgaaggggctggacttgctacctgtatagaactgtgtgtaaaggctcttcgcttggagtctacagaaaatactgaagtgaaaatatctatttgcaagaccatttcatgtttgttgcctgatgatctggaagttaaacgtgcttgtcaactgagtgaatttcttattgagcctacagtagatgcgtattatgctgtggaaatgttgtataatcagccagaccagaaatatgatgaagagaatcttccaataccaaattctttacgctgtgagctgttacttgtattgaaaactcaatggccctttgatccagaattctgggattggaaaaccttgaaacgacaatgtcttgcattaatgggagaagaagcatccattgtgtcttcaatagatgaactaaatgacagtgaagtatatgaaaaagtggtagactaccaagaagagagtaaagaaacttctatgaatgggctttctggtggagttggtgctaattctggccttcttaaagacattggtgatgaaaagcagaagaagagagagataaaacagttaagagagaggggatttatatctgctcggtttaggaattggcaagcctacatgcagtattgtgtgttgtgtgacaaagaattccttggtcacagaatagtacgacatgctcagaaacattacaaagatggaatttatagttgccccatatgtgcaaagaactttaattctaaagaaacttttgtccctcatgtcacactgcatgttaaacaatctagtaaagagagactagcagctatgaaaccattaagaagattgggaaggcctccaaagatcacaactaccaatgaaaatcagaagactaatactgtggctaaacaggagcagcgacctataaaaaagaatagtctctattcaacagattttatagtgtttaatgacaatgatggttcagatgatgagaatgatgacaaagataaatcctatgagccagaagtgattccagtccagaaaccagtacctgttaatgaatttaattgccctgtaactttttgtaaaaagggctttaagtactttaaaaatttaattgctcatgtgaaggggcataaagataatgaagacgccaagcgctttcttgaaatgcagagcaaaaaagttatttgccagtactgtaggcggcattttgtgagtgttactcatctcaatgatcacttacagatgcactgtggcagtaaaccatatatctgtatacagatgaaatgtaaagctggttttaatagttacgccgagcttttaacccaccgaaaggagcatcaagtctttagagcaaaatgtatgtttcctaaatgtggaagaattttttcggaagcttatttactatatgatcatgaagcacaacattataatacgtacacttgtaagttcacaggttgtggtaaagtttatcgttctcagggtgagctggaaaagcatctggatgatcacagtactcctcctgaaaaagtgctgcctcctgaagcccaacttaattcatctggagattccattcagccttctgaagtgaatcagaacacagcagagaatattgagaaagaaagatctatgcttccttcagaaaataacattgaaaacagcttactagcagatagaagtgatgcttgggataaaagcaaagcagaatcagctgtgaccaaacaagaccagatttctgcctctgagctcaggcaagctaatggaccattgtcaaatggtttggaaaaccctgctactactcctctacttcaatccagtgaagtagctgtgtccattaaggtgtctctcaatcaggggattgaggataactttggaaagcaagaaaactcaactgtggaaggcagtggtgaagcactggtcacagacttacatacgccagttgaagatacttgtaatgatttgtgtcatccaggtttccaggagagaaaagaacaagattgctttaatgatgcccatgttactcagaattctttagtaaattcagaaactctcaaaataggtgaccttaccccacaaaacttagaaagacaagtgaacaacttgatgaccttttctgtgcaaaatcaggcagcatttcaaaacaatttaccaacttccaaatttgaatgtggagataatgttaaaacatcatccaatctttataatttacctcttaagacattagaaagtattgcatttgttccaccgcagtccgacctaagtaattcattaggaactccatcagtgcctccaaaagctccagttcagaaattcagctgccaggtcgagggatgtactcgaacctataattcttcacagagtattgggaaacacatgaagacagcacaccctgaccaatatgctgcatttaaaatgcagcgcaaaagtaaaaaaggtcagaaagctaacaacttaaatacaccaaataatggaaagtttgtttattttttgccatcaccggtgaacagctcaaatccattttttacatcacagaccaaagccaatgggaatcctgcttgttcggcccagttgcagcatgtctcgccacccatttttccagctcatttagcaagtgtgtcaactccattgttgtcctcaatggaaagtgtcataaatccaaatataacttctcaggataaaaatgaacaaggtggtatgttatgttcccaaatggaaaatttacctagtactgccttgccagcacaaatggaagatctaaccaaaacagttctgcctttgaatattgacagtggctcagatcctttccttcctttacctgcagaaagtagttcaatgtctctcttcccttcaccagcagatagtgggactaattctgttttttcccaactggaaaataatacaaatcattattcctcacagattgaaggaaacactaattcctcctttctaaaggggggtaatggtgaaaatgcagtttttccttcacaagtgaatgttgcaaataacttcagtagcaccaatgcccaacagtctgcacctgaaaaagttaaaaaagaccgtgggcggggcccaaatgggaaggaaagaaaacctaagcacaacaaaagggctaaatggcctgcaattatcagagatgggaaatttatctgtagcaggtgttacagggcttttactaatcccagatcactgggtgggcacttatccaagcgatcttactgtaaaccactggatggagccgaaattgctcaagaacttctacagagtaatggacagccttctcttcttgccagcatgattctctccacaaatgcagtaaatttgcagcagccacaacaatctaccttcaatccagaagcatgttttaaagatccatcatttctacagcttcttgctgaaaatcgctcgccagcatttttaccaaatacatttcctcgatctggtgtgactaactttaataccagtgtcagtcaagaaggtagtgaaattattaaacaggctttggaaactgctggcattcccagtacatttgagggtgccgaaatgctttctcatgtttcaacaggttgtgtctctgatgcatcacaagtaaatgcaacggtgatgccaaatccaactgtaccacccctgttgcacactgtatgccatccaaacaccttgctgaccaaccagaataggacgtcaaactccaaaacttcctccattgaggaatgtagcagcttgcctgtttttccaacgaatgacttactactgaagactgttgaaaatggtttgtgctctagttcatttcctaattctggtgggccatcacaaaattttaccagtaacagttctcgtgtttctgttataagtggtcctcagaacacaagatccagtcatttaaataaaaagggaaacagtgcttctaagagaagaaagaaagttgctcctccactaattgcacctaacgcttcccaaaacttggtaacaagtgacttaacaacaatgggactcatagcaaagagtgttgaaatcccaactactaaccttcattcaaatgtaattccaacttgtgaacctcagagtttggtggaaaatctaacacagaaattaaataatgttaacaatcagttatttatgactgatgtaaaagagaatttcaaaaccagtcttgagtcccatacagtgttagcccctttaacattaaaaactgaaaatggtgattcccaaatgatggctttgaattcatgcacaacttcaataaattctgatttgcagatttctgaagacaatgttatacaaaactttgaaaagactcttgaaattattaaaactgctatgaattctcaaatacttgaggtaaaaagtggatctcagggtgctggtgaaacttcacaaaatgctcaaataaattataacattcagcttccttcagtaaacactgtgcaaaataacaaattacccgattcttctccgttttcctcctttataagtgtcatgccaacaaaaagtaacattcctcagtctgaagtatcacataaggaggatcaaatacaggaaattttagaaggcttacagaaattaaaattagaaaatgacctatccactccagcatcccaatgtgtactgataaatacatcagtgacactgactcccacgcctgttaaatcaactgcagatatcacagttattcagccagtttctgaaatgataaacattcaatttaatgacaaagttaataaaccctttgtgtgtcaaaaccaaggctgtaactacagtgctatgacaaaggatgcactatttaagcactatggtaaaattcatcaatacactccagaaatgattcttgaaattaagaagaatcaattgaaatttgctccctttaaatgtgtagtacctacatgtacaaaaacatttacaagaaattctaacctccgggcacactgtcagttggtgcatcattttacaactgaagaaatggtaaagttaaaaattaaaaggccttatggaagaaaatctcagagtgaaaatgtgccggcctcacgaagtacacaagtgaaaaaacagctagctatgacagaggaaaataaaaaggaatctcagcctgctttagaattgagagcagagacccaaaatacccacagtaatgtagcagtgatcccagaaaaacaacttgtagaaaaaaaaagtcctgacaaaacagaaagttctttacaagtgattacagttacttcagaacaatgtaatacaaatgcactcacaaacacacaaaccaaaggacggaagattaggaggcataaaaaagaaaaggaggagaaaaaacgaaagaagccagtttcccaatcccttgagtttccaacaagatacagtccttacagaccttatcgatgtgttcaccagggatgctttgctgcctttacgatacagcaaaacttgattctccattaccaggctgtacacaaatcagatctacctgcattttcagcagaggtcgaagaggaaagtgaagctggtaaagaaagtgaagaaactgaaactaaacaaactttgaaagaatttcgatgtcaggtaagtgactgttctcgaattttccaagcaattactggcctaatacaacactacatgaaacttcatgaaatgactcctgaagaaattgaaagtatgactgcttcagtggatgttgggaagtttccatgtgaccagttagagtgtaaatcttcatttactacatatttgaactatgttgttcatctagaggcagaccacgggattggactaagggcaagtaaaacagaagaagatggtgtatacaaatgtgattgtgaaggctgtgaccgtatatatgcaacccggtcgaatctcctccgacacatttttaataagcataatgacaaacataaggctcatttgattcgtccaagaagattaacaccaggccaggaaaatatgtcaagcaaggcaaaccaagaaaaatcaaagtctaaacatcgggggaccaagcacagcagatgtggaaaggaaggaataaaaatgcccaagaccaaacgaaagaaaaaaaataatttagaaaacaagaatgcaaagattgtgcagattgaagaaaataagccttattctctgaaacgtgggaagcatgtatattctataaaggctagaaatgatgccctgtctgagtgtacaagcagatttgtaacccagtatccatgtatgataaagggatgtacttcagttgttacaagtgaaagcaatataattagacattataagtgccataaattatctaaggcatttacatcacaacaccgaaatcttcttattgtattcaaacggtgttgcaactcacaagtaaaggaaacgtctgagcaagaaggtgctaagaatgatgtgaaagattctgacacgtgtgtatcagagagcaatgataattcaagaacaacagctacagtttcacaaaaggaagttgaaaaaaatgaaaaagatgaaatggatgaactaacagaattgtttattacaaaattaataaatgaagatagcacaagtgtagagacccaagctaatacttcttcaaatgtaagtaatgattttcaggaagataacctctgccagtcagaaagacaaaaagcaagtaatttgaagagagttaataaggaaaaaaatgtctcacaaaataaaaaaaggaaagttgaaaaagctgaaccagcatcagcagctgagttaagtagcgtgcgtaaagaagaagaaactgctgttgccattcaaaccattgaggagcatcctgcatcttttgactggagctcttttaagccaatgggatttgaagtatcatttctgaagtttcttgaggagtctgcagtgaagcagaagaaaaatactgacaaagaccatccgaatactggaaacaaaaaaggatcccattcaaattcaagaaaaaatattgataagactgctgtgactagtggaaatcatgtatgtccttgtaaagaaagcgaaacgtttgtacagtttgccaatccatcacagcttcagtgcagtgataatgtaaaaattgttttagacaagaatcttaaagattgcactgagcttgtcttaaagcaacttcaggaaatgaaacctaccgtcagtctgaaaaaacttgaagtacattcaaatgatccagatatgtctgttatgaaagatatcagtataggtaaagccacaggcagaggtcagtactgataattaatgtagtataaatacatcatttaccattttattttaaataggaagccatcaagcatgctagaattgtgaaactttcattatatttttttgttgttgacatgaattaacctggccaaaaacaaaaaagaaaaaaaaaacatgacatttgtcatgtaaaacttttttttatccctatgggacttgaggaacagaatcagtacttcagttattgtaaatagtgagctaaacctcaaatttctatcacccagttgcccttttcatgaactaaacaattatctgtgtgattggtatgtttcaccaggtcactgctcatgtataacagtactctttatttgtagataccttttttgtatatatttattattgtaaatcatgtgctgccaccagcagtctgtaagtctaaactattaaatgacacatttatatttggaattttaatttttaactaagcgatcaagttttttaaattgttcttttattgttttaaattaagaactttttgaactaaaaccagaaactctgccatagttcattgatttttacatgaaacatttatttacaagatgatatcaagattacttttcacaaaataggcacattatatcaacactttgctctgctttgtaaatttgccatccaggattttggggtggtattcatgtgaaattaaagcagattctctagcagtttcctatagctacagtttttttttttcattgcttctaattggatatagttactatgagtccatgaaatacaatggaaatgtgaataaagaatttactacattgaagattttaaacatttggtattaaaaaaaaatcctttgtgaatgtgatagaaaactagtagtgtggagcagtgtaaatatttgaggtggtgatttgtgaagtagcccagtattgccttaaataaaatcacatttcatttcttgttttatacatgtgatcttataaagattttttgttttgttttgttttccattttctgagatttatagattggtgtatagctttaaactgtataaagttttgtggaaagatttttttaaacatttttataaatcttaaaattgatatcatcaaagtgagcccatcttgtgtttataaaatacaagagtccttaacatttataattacatagataaaacactttctataaggaagttggatgttttgattttactgtttatagatgttagattgtacagatttgtctgtatttctcaccatatctaatgatacttttttcattagattggtcttcaagaacagtattagttataattattttggttattcagtatatagttagctcttacagtttagctttattcaccatatttatactgtggattcacagcgagaggtagaggttattccaggagagttgatgaccttcatttaaagtccaactaaaatcagtagtagaaacataagaaaacatctttgcaatatttacttttgtttctgtttgccgtaaatagtaacattgtttttttttattttgtgtttgttataaaacagttgcattcacaatattattggcctgagatattgatgatattgtgatggtatgaaaatgtgtacattccctgtgcaacatcagatttgcaggaaaaatgaagcacttactgaaatcgctggtactctgaataaataagcatggtcaaggagtgaactattttcttttggaaatttctttttaatttttattattaaagtattttatttttagggccttttgggttttattgaatagttcatttcacctgtttaagacttactaccaataagcataaaacctgacacgttaaaatccctgccctttggtgagcccactgttatttattaaaataaaagttattttatgggtgatt

SEQ ID NO: 249 - DNA, 2829 bp, Homo sapiens
actgagagacgccctggaacgtctgtggcagcttctgtctcgctgggacccgcactgacagcgggaggcagagggaggaacctggacgccggaagccgggaaatggactcagtggcatttgaggatgtggctataaacttcacctgtgaggagtgggctttgctgggtccatcacagaagagtctctacagagatgtgatgcaggaaaccatcagaaacctggactgtatagactgaataagaggaggggttggtcttgctgtctcaagagtagcagagactgaagaaattcatatgaatgatgatggcaaaatcatgatatagaagaagatcagtacaaagatctcagaagaaatctaagatgtcatatggtagagagagcctgtgaaattaaagataatagtcaatgtggaggaccctttacccagactcaagacagtattgtgaacgagaaaatacctggagtagatccatgggaaagcagtgagtgtacagacgtcctcatgggtcgttcatctcttaattgctacattagagttgacagtgaacacaaaccatatgagtatcaagaatatggagagaagccatatacacatacacaatgtgggacagctttcagttatcagccctgctttcaaatacatgaaagacctcagcatggaaagaaactctatgattgtaaggaatgtgcaagcttcagttctcttgaaaaccttcaaagacacatggcagcacaccatggagatggacctcgtatatgtaagttgtgtggaaacgcctttatttggcctagtttatttcatatgcttagaagaactcacactgaagagaaaccatatgaatatgagcagtgttctacagcgtttcctgcttatagttccactctaagacatgaaagaacacacagtggagagaaaccctatcaatgtaaacaatgtgggaaagccttcagttgttcctgttacactcaactatatgaaaggactcacactggagaacaatcctatgaatgtaagcaatgtgggaaagcattttatcatcttggaagctttcaaagacacatgatagtgcacactggagatgggcctcataaatgtaagatatgtggaaaaggctttctttctcccagttcagttcgaagacataaaagaactcacactggagagaaaccgtatgaatgtaagtattgtgggaaagcattctctgattgcacaggttttcgaagacacatgataacgcacactggagatggacctcataaatgcaaggtatgtgggaaagcctttgattctcccagtttatgtcgaaggcatgaaacagctcatactggggagaaaccctataaatgtgaatgtgggaaagcctttagtgatttctattactttcgaaatcatgaaactactcacactggagagaagccatataaatgtaaacaatgtggaaaagccttcatttgttgcacttaccttcaaatacatgaaagaattcacactggggagagaccctataaatgtaaacaatgcggaaaagccttcaggtcttccaattacattcgagtacatgaaaagactcacactggagaaaagccctatgaatgtaagcagtgtggaaaagcactttctcatctgaaaagctttcagagacacatgataatgcacactggagatggacctcataaatgtaagatatgtgggaaaagctttgattctcccagttcatttcgaagacatgaaagaattcacactggggagagaccctataagtgtaaactatgtgggaaaggcttcaggtcttccagttacattcaactacatgaaaggactcacactggagagaaaccctatggttgtcagcaatgtgggaaagcattatctgatctctcaagctttcgaagacacatgataacacatactggaaatggacctcataaatgtaagatatgtgggaaaggctttgattatcccagttcagtgcaaagacatgaaagaactcacactggagagaaaccctatgaatgcaaggaatgtggtaaagccttcagtcattcaagttacttacgaatacacgaaagagttcatactggagagaagccgtataaatgtaaggaatgtgggaaaccattccattgtcccagtgcctttcataaacatgaaaggacccacagtatggagaaaccctataagtgtaaagaatgtggggaagcatttcattgtatcagttcctttcataaacatgaaatgactcactagagaaaacccctatgagtgttgaacatgtgagaaagccttaagtactttcagcttcttacaaatacataagagactcacactgaaaaaagttgtatgaatataaaaatatactaaaaccttccatttttttcagtaccttttgaaaacatgaccaaactcatacttcaaaaatatatatataatgaatgtgaggaatatgaaaaaactttctttctctagcaaactttcaaaggtggttattataacatactagcaatggaccttactactgtaaggaatgtagaaatgcatttactagtcctaactcatttcagttacatgaaagatttcaaactgcagagaaccactatgaatgtaaacaatgtggtaaagcatttagtagcttcagtttcttttgaatacagtcttctctagtttctgaggtgaattgattccagcaccctcaggaatacctatattcagagatattcaagtccctgatattaaaaacagcatatttgcatataatctaggcacatttttctgtatatcttaaatcatttctagattacttataatacacaatgcattgtaaattctg

SEQ ID NO: 250 - DNA, 4722 bp, Homo sapiens
ggccattgtttctctctgctgccggagctccaggtctacccttcactgctctgtgtcctcagcgtgtgtggcttcgtgacctgaagatactgggaaatccatagctaagatgccaggaccccctgaaagcctagacatgttatatgttctcattttgctgaagacttttgcccagggccaggcattaaagattcttttcaaaaagtgatactgagagaatatgtaaaatgtggacataaggatttacagttaagaaaaggatgtaaaagtatgaatgagtgtaatgtgcacaaagaaggttataatgaactaaaccagtatttgacaactacccagagcaaaatatttcaatgtgataaatatgtgaaagtctttcataaacttttaaattcaaatagacataacacaaaacatactggaaagaaacctttcaaatgtaaaaaatgtggcaaatcattttgcatgcttttacacctatgtcagcataaaagaattcatattagagagaattcttaccgatgtgaagaatgtggcaaagcctttatctggttttcaacccttactagacacaggagagttcatactggagagaaatcctacaaatatgaatgtggcaaatcttttaaccaggactcaaaccttactacacataagagaattcatactggacagaaaccctacaaatgtgaagaatgtggcacatctttctaccaattctcataccttactaggcataagctaattcatactagagagaaaccctataaatgtgaacaatatggcaaaacttttaaccaatcttcaacccttactggacataagataattcataatggagaaaaaccctataaatgtgaagaatgtggcaaagcctttagtattttctcaacccctactaaacataagataattcacactgaagagaaatcccacagatgtgaagaatattgcaaagcttataaggagtcctcacaccttactacacataaaagaattcatactggagagaaaccctacaaatgtgaagaatgtggcaaagcctttagtattttctcaacccttactaaacataagataattcacactgaagagaaatcccacagatgtgaagaatgtggcaaagcttataaggagtcttcacaccttactacacataaaagaattcatactggagagaaaccctacaaatgtgaagaatgtggcaaaacctttagtgtattctcaattcttactaaacataaaataattcatacagaagagaaaccctacaaatgtgaagaatgtggcaaagcttttaaacgatcttcaacccttactaaacataggataattcatactgaagagaaaccctacaaatgtgaagaatgtggcaaagcttttaaccaatcttcaacccttagtatacataaaataattcatactggagaaaaaccctacaaatgtgaagaatgtggcaaagcttttaaacgatcttcaacccttactatacataaaatgattcacactggagaaaaaccctacaaatgtgaagaatgtggcaaagcttttaatcggtcctcacaccttactacacataagagaattcatactggacacaaaccctacaaatgtaaagaatgtggcaaatcctttagtgtattctcaacccttactaaacacaagataattcatactgataagaaaccctacaaatgtgaagaatgtggcaaagcttttaaccgatcttcaatccttagtatacataagaaaattcatactggagaaaaaccctacaaatgtgaagaatgtggcaaagcttttaagcggtcctcacacctcgctgggcacaagcaaattcatagtgtacaaaaaccctacaaatgtgaagaatgtggcaaagcctttagtatattctcaacccttactaaacataagataattcatactgaagagaaaccctacaaatgtgaaaaatgtggcaaaactttctaccgattctcaaaccttaatacgcataagataattcatactggagagaaaccttgcaaatgtgaagaatgtggcaaagcttttaaccattcctcaaaccttattaaacataagctaattcatactggagacaaaccctacaaatgtgaagcatgtggcaaagcttttaggcggtcttcacatcttagtagacataagataattcatattggaattcatactgaagagactgtacaaaagtgaagaatgtggcaaaggcctttactgctcctattcccttactaaagaatgtggcaaagcttttcaccagtactttacccttaatacacataagataattaatgctggagagaaaccctacaaatgtgaagaatgtggcaaagatttctattgattctcataccttactaaatataagataattcatattggagagaaattctacagatgtgaagaatgtggcaaaggctttaattagttctcatcccttactaaacataagagaattcataccatagagaaatcctacaaatatgaagaatgtgacaaagcttttaaccacttctcaaccctgcctacacgtaagataattcatactggaaggaaaccctacaaatatgaggaatgtctcaaagctttttactgattcttataccttactaaacataaaataattcataaaggagataaattatacaaatgtgaagaatgtggcaaagcttttaacaaatcctcatccattagtaaacataagataattcatactggagagaaaacctacaaatgtgaggaatgtggcaaagcctttagcctgtccctccaatttactgcacataagataatttatactggagagaagccctacaaatgtgaaaaatgtggcaaaccttttaaccaatcctcaacccttactacacattagataattcatgctggagagaaaccctacaaatgtgaaaaatgtggcaaagcttttaaccaattttcaaaccttactaaacataagataactcatactggagaaaaatcttacaaatgtgaagaatgtggcaaagcctttatccagtcctcaactcctagtaaacataattaatgatggagagaaaccatacaactgtgaagaatgtggcaaagcttttaaccagtcctcaaactttattgaacaaaataattcatacaggagagaaaccctacaaatgtgaagaatgtgacaaagcctttaaccagtcctcaatttttactaaacataagaaaattcatactggagagaaaccctatgattgtgaaaaatatggcaaaggctttaactagtcctcagttcttaacacacatacgataattcttactgcagagaaactctacaaaccagtaagatgtgacagtgcttctgacaacatctcaaacttttctaatcataaaagaaatcatattggtgagaaatcctagaaatgtggagaatgtaacaaagtatttaaatggttgtcacacttgattataggtaatattcatattggaaaaatttcctacaagtaagaacaatgtggcaaagtttttaactaatacaccttattgcacagaaaatcatttatatttgagaaaaattgtagaaatatagactgtgaaaaagacgtcaatatctgctcacatcttactaaacaccagagagttcatgcttaataaaagcatgataagtgcaattactgccaaaagatctttcagaaaatattatcctttaaagtgaaggagagtatttatattaaagatgaacattacaaccataaagagggttgaagtacctttacttgtatcagatcttattgtccacattttgtactacagaaaaactctgaagaggtcactcaaactttgttcaacatcagggaatttatattggagagctgtcttgcaaatgtaataaatttgggaaaacaaattttcaaaaactacagcttagaaaacaccagagtttatacgaaaatatattttcaaaggtgtagtaaaaataaaaaaaattttaatccaaatttgtctatgtaaataccagaatttatagtagaaatatatgaggaagcgacacttcgaatattctactaaatgagagttctgagtatagaaaataaaactaaagttggtagaaaaattatttgtatataatgttaagaggagtaaaagattttttgtagaataataactatattcggattatactttgtttcttgaaaaaattacagattttttgaaaagcaaatgatgtaactcaactcattattttctgctgtttcttcattcttattcacttgtgaaagcttgtgatcatttgttgctgcatcagaggtatgagagattcttcttcattagatgggcattatttatgatcttttctatggatgagtaagaatattaaaatgtaagatgcatggtgaaaatctaagtggagaggttctttgtggttaacttatactattgagtgatgcacaaggtaggtgttaagagtaatattcttttgcattatgagaaaactagtatattattcatatattttactaattgtactttttttattatactttaagttttagggtacatgtgcacaatgtgcaggttagttacatatgtatacatgtgccatgctggtgcgctgcacccactaactcgtcatctagcattaggtatatctcccaatgctatccgtcccccctccccccaattgtacttttatataataaaatgcagtacattttaaaaaattttaaa

SEQ ID NO: 251 - DNA, 1905 bp, Homo sapiens
gttagtctccgctgctagttcttggctctgggaggcccaggtggctctgcagcagcctctgccaccctgtgacctgcgagtattgggacatccctagctgacgccaggacacccgggaagccgaggaatggtgagtggactgcgcctggcttcccgaagtggagaagagggctggttgaaacctgctgtggcgcgactcgggcctccacgccatcggctccggaacctgcggaccgagtcgccgtggcgtagccggggctcagtcctcttctgttcagggccgggccgggcggggcgggcagcggaacccctgcatcctgtctgtacctgcgggcgccacttccgccggccggatccctgtcgggaacccctcgcctcccctatccaggactcggtggcttttgaggatgtggctgtgaactttacccaggaggaatgggctttgctagattcttctcagaagaatctctacagagaagtgatgcaggaaacctgtaggaacctggcttctgtaggaagccaatggaaagaccagaatattgaagatcacttcgaaaaacctgggaaagatataagaaatcatatcgtacagagactgtgtgaaagtaaagaagatggtcagtatggagaagttgtcagccaaattccaaatcttgatctgaacgagaacatttctactggattaaaaccatgtgaatgcagtatttgtggaaaagtctttgtacgtcattccctctttaataggcatatcctagctcactcaggatacaaaccatatggagagaagcaatataaatgtgaacagtgtgggaaattcttcgtttctgttccaggtgttagaagacacatgataatgcacagtggaaatccagcttataaatgtacgatatgtgggaaagctttttattttctcaattcagttgaaagacatcagagaactcacacaggagaaaaaccctataaatgtaaacaatgtggtaaagcattcactgtttccggttcttgtctaatacatgaacgaactcacactggagagaaaccctacgaatgtaaggaatgtgggaaaacattcagattttcttgttcttttaagacgcatgaaaggactcacactggagaaagaccctataaatgtaccaaatgtgataaagccttcagctgttccacttcccttcgttaccatggaagcattcatactggagagagaccctatgagtgtaaacaatgtggcaaagcctttagtcgtttgagttccctttgtaaccatagaagtactcataccggagagaaaccctatgaatgtaaacaatgtgatcaagccttcagtcgcctcagttcccttcacctccacgaaagaattcatactggagaaaaaccctatgaatgtaagaaatgcggtaaagcctacactcgttccagtcaccttactcgccatgaaagaagtcatgatatagaggctgggtgtagtgactcagcctataatcccagcactttgggaggccaaggcgtgtggattgcttgagcccaggagttcataaccagcctggattaaaacaatgtgaaacaacctgggcaacatggtgaaaccctgtctttacaaaaaataaaataatgccgggcacggtggcttacgcctgtaatcccagcactttgggaggccgaggcgggtggatcacgaggtcaggagatcgagaccatcctggccaacacggtgaaaccccgtctctactaaaaatacaaaaaattagctgggcgtggtggcgggcgcctgtggtcccagttactcggggggctgaggcaggagaatggcatgaacccgggaggcggaacttgcggtgagccgagatcgcaccactgcacttcagcctgggtgacagagtgagactctgtctcaaaaaataagat

SEQ ID NO: 252 - DNA, 2952 bp, Homo sapiens
agactgaccactagccgacgcgggcgagagggacaggagcgtgacctccccatcccgaggggccggacgctcgggcgcctccccgctccccccactcggaggccgcgcgcgccgttagccccttcctcgctcccccgccccagtcccgcagtccgggaggcgggggtcggcagccggctgagtgggaaccgcgcggtgtctgaggaggcagtcggcgaccggtttccacttcaagcgtgacccttttgcctgtgggatgagctccagcatggggtgaggtacagaagagagacttgaagagcgtgccttgggactcaagcgccaaacctgtaccctagcgagtgtcctactccgcatccgtaatggaaggaaatgcacatcttactccagaggcacaagaggaggacatcccatgcggctactcctgcccagcgtggtggggcagcagaagctccagagcccagacttgcaggctcacggtgcagggtgaacctggccacagctcaccctggaacagccacaatgtctgccccttagagaagaaccctgaaatcagaccagtttttgcggcctccccctttcctctctgttacagtgccctttccaggccttaagagaagtaaaacttagctgcagcgccaggaggtggaccccagagtgtgagtggcacgcttccctgtgaacccgtcctcaccatgtttgccacatctggggcagtggcagcggggaagccttactcgtgcagcgaatgtggcaagagcttctgctacagctcagtgctgctgcgacatgaacgagctcacggcggtgacggccgcttccgttgcctagaatgcggtgagcgctgtgcacgggctgctgacctccgagcgcacaggcgcacgcatgctggccagaccctctacatctgcagtgagtgcggacaaagcttccgccacagcggccgtcttgacctacacttgggcgcacaccggcagcgatgccgcacttgcccctgccgcacatgcggccggcgcttcccgcacctcccggcgctgctgctacaccggcgccgccagcatctgccagagcggccccgccgctgcccgctgtgcgcccgcaccttccggcagagcgcgctgctcttccaccaggcgcgggcgcaccccttggggacaacctctgaccctgctgccccaccccaccgctgcgcgcagtgcccgcgagccttccgaagcggcgccgggctgcggagtcacgcgcgcatccacgtgtcccggagccccacgcgaccccgtgtctcagacgcccaccagtgtggcgtgtgcggcaagtgctttggcaagagctctacgctgacgcgacacctgcagacgcactcgggggagaaacccttcaagtgcccggagtgcggcaagggcttcctggagagtgccacgctggtgcgccaccagcgcacacacacgggcgagaagccgtacgcatgtggcgactgtggacgctgcttcagcgagagttccacgctgctgcgccatcggcgcagccatcagggcgagcggccacatgcgtgcgccacttgcggcaagggtttcgggcagcgctccgacctggtggtgcaccagcgcatccacacgggcgagaagcccttcgcgtgccccgagtgcggccgccgcttcagcgaccgctcggacctcaccaagcaccggcgcacgcacacgggcgagaagccctaccgctgcgaactgtgcggcaagcggttcacgtgcgtgtccaatctcaacgtgcatcggcgcaaccatgccggccacaagccacacaaatgccccgagtgcagcaaggccttcagcgtcgcctccaagcttgcactgcaccgcaagacgcacctgggcgaacggccagcggagtgcgcagagtgcggcaagtgcttcagccacagccgctcgctgtcacagcatcagcgggcccacacgcgcgcccgcaccgctgccgccgttgccatccagtccgcagtgggcactgccctcgtctttgaggggccggctgaacaggaaaagccagggttctctgtgtcctagttgagggaggcttgctgaggcttctctaaaggtggttgggcaagcacctatatagtatcacggggacagttgaggcaactcgtagatggagatttgggaaaagacgatgtggcctcctacctttccagtttctgttggcagcccttcacgtagcctcctgcctcgcctctacacctactaccctgtcggcccttttgccatgctgtcctcgtataactcggattctctcctcaggtgtaggtgcagggagtcagggaacccttagactcccctgtgtgcaagagcccaggtgttggtgtgtccctttaatgctactgtgctctctggtgtttctgattttcctgcctttattctgtcttctcttgtcctatctcattccagcccacatcttctcctttcctgattacttttgttgtcctgcctcttcaggtaatggtcacagatttggctgtaggcacgttaccagccctgtggcttcttgactcttggttccctgttaactctgtttctgagaaatgtgggtatggaggtgggtgggaaagctcacttccatgaaggatgtctccatgctaggagctgcctgcaccctggcagaggtggccagtcacgtgaaggtgggcagggcccttagcatggccacacatgtccccagggcagatcaaggggcctctcagaaccatgttccccagccaggtgaggaccattttcactgggacccaggccaaaaccatgtgggtgcacaaagccaggcactgccaagtggaacatgaggttatttccaaatcatgggagccaccagcagggagagggcaggatggaaaatcccctggagccggtcaactttttgctcatggctagtgaaataaagttgtttgagtactaaaaaaaaaaaaaaaaa

SEQ ID NO: 253 - DNA, 60 bp, Homo sapiens
tcgccttagcatgtttgctgaacaccttgtggaagcaaaaatctgaaaatgtgaataaaa

SEQ ID NO: 254 - DNA, 60 bp, Homo sapiens
ggtgaactcaacagaagttgctcttgactgtttgaaggtagaagcagcctaccttttctc

SEQ ID NO: 255 - DNA, 60 bp, Homo sapiens
ctccacctgttagaagctatgtgtttgaaggaatgaatcagtgcagtataaataaaattc

SEQ ID NO: 256 - DNA, 60 bp, Homo sapiens
agcatgttctcatcggcggagccttcttgtgtaatgtaaactgtgccatgttattaaaaa

SEQ ID NO: 257 - DNA, 60 bp, Homo sapiens
ccaggccacacaataattcggggttgtattttctaagaactatgtattgtttttagctta

SEQ ID NO: 258 - DNA, 60 bp, Homo sapiens
agaggaagaggaagctgggcattaaattacctcatccagcagaaattcacggtagtatgg

SEQ ID NO: 259 - DNA, 60 bp, Homo sapiens
catcagattgtacagtttggttgttgctgtaaatatggtagcgttttgttgttgttgttt

SEQ ID NO: 260 - DNA, 60 bp, Homo sapiens
taagtaatttgtatgccaaaaaattacaataagtcaataaagatctcacctctgaaaaaa

SEQ ID NO: 261 - DNA, 60 bp, Homo sapiens
aaggctgggcatttgtttgaaattagataggataaagccaaaggtttgaacaagttgtgg

SEQ ID NO: 262 - DNA, 60 bp, Homo sapiens
ctcagggaccaaggagatggggagggcgcttttgtacgttaattaaacaaattccttccc

SEQ ID NO: 263 - DNA, 60 bp, Homo sapiens
gggtttatgcactaaacgttttgtgccttggtctaatattaacatgatgtatgtgtaaac

SEQ ID NO: 264 - DNA, 60 bp, Homo sapiens
tgctaaatattaaactactaggttctgaatgtaaaccattatcttcctgcttttaaaaaa

SEQ ID NO: 265 - DNA, 60 bp, Homo sapiens
ttaagagtattgattgaagtttgtgatattcatcaataaaaatgagttgataataaaaaa

SEQ ID NO: 266 - DNA, 60 bp, Homo sapiens
gctaagctactgtcccatctcttgtgatgtgtaacttttacatgtgaatattaaagtaga

SEQ ID NO: 267 - DNA, 60 bp, Homo sapiens
agaaatctgttgcttaaaaaagaagtttctttggtggtgtgcgtctatagtcccagctac

SEQ ID NO: 268 - DNA, 60 bp, Homo sapiens
cagtggcattgtgcatattgggataggaatttgattttgtgaactcaagctattcagcag

SEQ ID NO: 269 - DNA, 60 bp, Homo sapiens
agggcttcgaagataaactgagctccattcccctggcatgaaactttcagattcccctgc

SEQ ID NO: 270 - DNA, 60 bp, Homo sapiens
cgcatgagtgaatgtcctatctgtcgcaaggctattgaacgaaggattcttttgtattaa

SEQ ID NO: 271 - DNA, 60 bp, Homo sapiens
gtccttgaaagtctccatctaaagaggaaaagtttgttggaacagtatatattccctatt

SEQ ID NO: 272 - DNA, 60 bp, Homo sapiens
acttctttttccaggttttattttcagttttaaattcctaataaattatttgaaaacgtt

SEQ ID NO: 273 - DNA, 60 bp, Homo sapiens
aagtttgtgaaaggtttccatcctctactgtggtccagaaatcaatgtgtttgtctgaca

SEQ ID NO: 274 - DNA, 60 bp, Homo sapiens
ctaactcatgtgagcttgataactgatgaactcattgggagcattttaaacttttctaca

SEQ ID NO: 275 - DNA, 60 bp, Homo sapiens
gcgcaaaatgcagctttatactttttactttcaattgcctagcacaatagtgagtacatt

SEQ ID NO: 276 - DNA, 60 bp, Homo sapiens
ttctccaggaatactgaacatgggagctcttgaaatatgtagtattaaaagttgcatttg

SEQ ID NO: 277 - DNA, 60 bp, Homo sapiens
aaagaagagaactttgtgctctgttttaccttactctgtttagaaaagtatacaagcgtg

SEQ ID NO: 278 - DNA, 60 bp, Homo sapiens
ccattgagctgttacccgaagtcagattaaaaatcagggagtgttttccctcgtttctgt

SEQ ID NO: 279 - DNA, 60 bp, Homo sapiens
atgctttgtggcaatacgtgactcttattcacagtagcaattcttattttactttacgtc

SEQ ID NO: 280 - DNA, 60 bp, Homo sapiens
aatacagtagcacctaaggagcttgaatcttggttcctgtaaaatttcaaattgatgtgg

SEQ ID NO: 281 - DNA, 60 bp, Homo sapiens
cagtgcagaatactaccggcatcttgttactgcaatagttggaaataaaatgtgaaaatt

SEQ ID NO: 282 - DNA, 60 bp, Homo sapiens
gtctcaaataataataataataataaagctggagacttggccacacctgggctaaaggaa

SEQ ID NO: 283 - DNA, 60 bp, Homo sapiens
atgtataaactctcaccacaggaagcatcgctgtttccaataaatattgctgaagacaga

SEQ ID NO: 284 - DNA, 60 bp, Homo sapiens
agatgaaacaaagcagtgaaaccctacagtttaaatgatgtcacttttagtgctgttggc

SEQ ID NO: 285 - DNA, 60 bp, Homo sapiens
gtctgtctgtacagttactcatgtcattgtaatgatttcactcctaactgtgacattttt

SEQ ID NO: 286 - DNA, 60 bp, Homo sapiens
taatgttctctatttcttcttgattatttattagctttggatgttaaaaattagccaaaa

SEQ ID NO: 287 - DNA, 60 bp, Homo sapiens
ttattaatcttaatattttgtttggaaaagcatgttataatataatgttttcacaaaaaa

SEQ ID NO: 288 - DNA, 60 bp, Homo sapiens
tcaataagtaattatcaagtttggaaggaaaggttgaaatgactccgtttccttataagc

SEQ ID NO: 289 - DNA, 60 bp, Homo sapiens
ctcctacaaggagatatggctggaccaaaataaaatgacatgaaattgcaaaaatgaaaa

SEQ ID NO: 290 - DNA, 60 bp, Homo sapiens
tcaaagtctaaacatcgggggaccaagcacagcagatgtggaaaggaaggaataaaaatg

SEQ ID NO: 291 - DNA, 60 bp, Homo sapiens
ttctgtatatcttaaatcatttctagattacttataatacacaatgcattgtaaattctg

SEQ ID NO: 292 - DNA, 60 bp, Homo sapiens
taataactatattcagattatactttgtttcttgaaaaaattacagattttttgaaaagc

SEQ ID NO: 293 - DNA, 60 bp, Homo sapiens
cgtctctactaaaaatacaaaaaattagctgggcgtggtggcgggcgcctgtggtcccag

SEQ ID NO: 294 - DNA, 60 bp, Homo sapiens
tggagccggtcaactttttgctcatggctagtgaaataaagttgtttgagtactaaaaaa

What is claimed is:

1. A method for predicting response of an human subject to an agent that modulates the RAS signaling pathway, said method comprising:
(a) classifying said human subject as having a deregulated or regulated RAS signaling pathway, wherein said classifying comprises:
(i) calculating a measure of similarity between a first expression profile and a regulated RAS signaling pathway template, said first expression profile comprising the expression levels of a first plurality of genes in an isolated cell sample derived from said human subject, said regulated RAS signaling pathway template comprising expression levels of said first plurality of genes that are average expression levels of the respective genes in a plurality of human control cell samples not having at least one or more components of said RAS signaling pathway with abnormal activity, said first plurality of genes consisting of at least 5 of the genes for which biomarkers are listed in Tables 2a and 2b, wherein at least 1 gene of said 5 genes is selected from Table 2b;
(ii) classifying said cell sample as having said regulated RAS signaling pathway if said first expression profile has a high similarity to said regulated RAS signaling pathway template, or classifying said cell sample as having said deregulated RAS signaling pathway if said first expression profile has a low similarity to said regulated RAS signaling pathway template; wherein said first expression profile has a high similarity to said regulated RAS signaling pathway template if the similarity to said regulated RAS signaling pathway template is above a predetermined threshold, or has a low similarity to said regulated RAS signaling pathway template if the similarity to said regulated RAS signaling pathway template is below said predetermined threshold; and
(iii) displaying; or outputting to a user, user interface device, a computer readable storage medium, or a local or remote computer system; the classification produced by said classifying step (ii);
wherein said human subject is predicted to respond to said agent if said cell sample is classified as having a deregulated RAS signaling pathway.

2. A method for predicting response of an human subject to an agent that modulates the RAS signaling pathway, said method comprising:
(a) classifying said human subject as having a deregulated or regulated RAS signaling pathway, wherein said classifying comprises:
(i) calculating a signature score by a method comprising: a) calculating a differential expression value of a first expression level of each of a first plurality of genes and each of a second plurality of genes in an isolated cell sample derived from said human subject relative to a second expression level of each of said first plurality of genes and each of said second plurality of genes in an human control cell sample, said first plurality of genes consisting of at least 3 or more of the genes for which biomarkers are listed in Table 2a and said second plurality of genes consisting of at least 3 or more of the genes for which biomarkers are listed in Table 2b; b) calculating the mean differential expression values of the expression levels of said first plurality of genes and said second plurality of genes; and c) subtracting said mean differential expression value of said second plurality of genes from said mean differential expression value of said first plurality of genes to obtain said signature score;
(ii) classifying said cell sample as having a deregulated RAS signaling pathway: a) if said obtained signature score is above a predetermined threshold, and b) if said signature score is statistically significant; and
(iii) displaying; or outputting to a user, user interface device, a computer readable storage medium, or a local or remote computer system; the classification produced by said classifying step (ii);
wherein said human subject is predicted to respond to said agent if said cell sample is classified as having a deregulated RAS signaling pathway.

3. The method of claim 2, wherein said first plurality of genes consists of at least 5 or more of the genes for which biomarkers are listed in Table 2a and said second plurality of genes consists of at least 5 or more genes for which biomarkers are listed in Table 2b.

4. The method of claim 2, wherein said first plurality of genes consists of at least 10 or more of the genes for which biomarkers are listed in Table 2a and said second plurality of genes consists of at least 10 or more genes for which biomarkers are listed in Table 2b.

5. The method of claim 2, wherein said first plurality of genes consists of at least 20 or more of the genes for which biomarkers are listed in Table 2a and said second plurality of genes consists of at least 20 or more genes for which biomarkers are listed in Table 2b.

6. The method of claim 2, wherein said first plurality of genes consists of all of the genes listed in Table 2a and said second plurality of genes consists of all of the genes for which biomarkers are listed in Table 2b.

7. The method of claim 2, wherein said differential expression value is log(10) ratio.

8. The method of claim 2, wherein said threshold is 0.

9. The method of claim 2, wherein said signature scores is statistically significant if it has a p-value less than 0.05.

10. The method of claim 2, wherein said agent is a MEK inhibitor.

11. A method for predicting response of an human subject to an agent that modulates the PI3K signaling pathway, said method comprising:
(a) classifying said human subject as having a deregulated or regulated RAS signaling pathway, wherein said classifying comprises:
(i) calculating a signature score by a method comprising: a) calculating a differential expression value of a first expression level of each of a first plurality of genes and each of a second plurality of genes in an isolated cell sample derived from said human subject relative to a second expression level of each of said first plurality of genes and each of said second plurality of genes in an human control cell sample, said first plurality of genes consisting of at least 3 or more of the genes for which biomarkers are listed in Table 2a and said second plurality of genes consisting of at least 3 or more of the genes for which biomarkers are listed in Table 2b; b) calculating the mean differential expression values of the expression levels of said first plurality of genes and said second plurality of genes; and c) subtracting said mean differential expression value of said second plurality of genes from said mean differential expression value of said first plurality of genes to obtain said signature score;
(ii) classifying said cell sample as having a deregulated RAS signaling pathway a) if said obtained signature score is above a predetermined threshold, and b) if said signature score is statistically significant; and
(iii) displaying; or outputting to a user, user interface device, a computer readable storage medium, or a local or remote computer system; the classification produced by said classifying step (ii);
wherein said human subject is predicted to respond to said agent if said cell sample is classified as having a deregulated RAS signaling pathway.

12. The method of claim 11, wherein said first plurality of genes consists of at least 5 or more of the genes for which biomarkers are listed in Table 2a and said second plurality of genes consists of at least 5 or more genes for which biomarkers are listed in Table 2b.

13. The method of claim 11, wherein said first plurality of genes consists of at least 10 or more of the genes for which biomarkers are listed in Table 2a and said second plurality of genes consists of at least 10 or more genes for which biomarkers are listed in Table 2b.

14. The method of claim 11, wherein said first plurality of genes consists of at least 20 or more of the genes for which biomarkers are listed in Table 2a and said second plurality of genes consists of at least 20 or more genes for which biomarkers are listed in Table 2b.

15. The method of claim 11, wherein said first plurality of genes consists of all of the genes listed in Table 2a and said second plurality of genes consists of all of the genes for which biomarkers are listed in Table 2b.

16. The method of claim 11, wherein said differential expression value is log(10) ratio.

17. The method of claim 11, wherein said threshold is 0.

18. The method of claim 11, wherein said signature scores is statistically significant if it has a p-value less than 0.05.

19. The method of claim 11, wherein said agent is a PI3K inhibitor.

20. The method of claim 11, wherein said agent is an AKT inhibitor.

21. A method of assigning treatment to an human subject, said method comprising:
(a) classifying said human subject as having a deregulated or regulated RAS signaling pathway, wherein said classifying comprises:
(i) calculating a signature score by a method comprising: a) calculating a differential expression value of a first expression level of each of a first plurality of genes and each of a second plurality of genes in an isolated cell sample derived from said human subject relative to a second expression level of each of said first plurality of genes and each of said second plurality of genes in an human control cell sample, said first plurality of genes consisting of at least 3 or more of the genes for which biomarkers are listed in Table 2a and said second plurality of genes consisting of at least 3 or more of the genes for which biomarkers are listed in Table 2b; b) calculating the mean differential expression values of the expression levels of said first plurality of genes and said second plurality of genes; and c) subtracting said mean differential expression value of said second plurality of genes from said mean differential expression value of said first plurality of genes to obtain said signature score;
(ii) classifying said cell sample as having a deregulated RAS signaling pathway a) if said obtained signature score is above a predetermined threshold, and b) if said signature score is statistically significant; and
(iii) displaying; or outputting to a user, user interface device, a computer readable storage medium, or a local or remote computer system; the classification produced by said classifying step (ii);
(b) assigning said human subject for treatment with an agent that modulates the RAS signaling pathway, if said cell sample is classified as having deregulated RAS signaling pathway.

22. The method of claim 21, wherein said first plurality of genes consists of at least 5 or more of the genes for which biomarkers are listed in Table 2a and said second plurality of genes consists of at least 5 or more genes for which biomarkers are listed in Table 2b.

23. The method of claim 21, wherein said first plurality of genes consists of at least 10 or more of the genes for which biomarkers are listed in Table 2a and said second plurality of genes consists of at least 10 or more genes for which biomarkers are listed in Table 2b.

24. The method of claim 21, wherein said first plurality of genes consists of at least 20 or more of the genes for which biomarkers are listed in Table 2a and said second plurality of genes consists of at least 20 or more genes for which biomarkers are listed in Table 2b.

25. The method of claim 21, wherein said first plurality of genes consists of all of the genes listed in Table 2a and said second plurality of genes consists of all of the genes for which biomarkers are listed in Table 2b.

26. The method of claim 21, wherein said differential expression value is log(10) ratio.

27. The method of claim 21, wherein said threshold is 0.

28. The method of claim 21, wherein said signature scores is statistically significant if it has a p-value less than 0.05.

29. The method of claim 21, wherein said agent is a MEK inhibitor.

30. A method of assigning treatment to an human subject, said method comprising:
(a) classifying said human subject as having a deregulated or regulated RAS signaling pathway, wherein said classifying comprises:
(i) calculating a signature score by a method comprising: a) calculating a differential expression value of a first expression level of each of a first plurality of genes and each of a second plurality of genes in an isolated cell sample derived from said human subject relative to a second expression level of each of said first plurality of genes and each of said second plurality of genes in an human control cell sample, said first plurality of genes consisting of at least 3 or more of the genes for which biomarkers are listed in Table 2a and said second plurality of genes consisting of at least 3 or more of the genes for which biomarkers are listed in Table 2b; b) calculating the mean differential expression values of the expression levels of said first plurality of genes and said second plurality of genes; and c) subtracting said mean differential expression value of said second plurality of genes from said mean differential expression value of said first plurality of genes to obtain said signature score;
(ii) classifying said cell sample as having a deregulated RAS signaling pathway a) if said obtained signature score is above a predetermined threshold, and b) if said signature score is statistically significant; and
(iii) displaying; or outputting to a user, user interface device, a computer readable storage medium, or a local or remote computer system; the classification produced by said classifying step (ii);
(b) not assigning said human subject for treatment with an agent that modulates the PI3K signaling pathway, if said cell sample is classified as having deregulated RAS signaling pathway.

31. The method of claim 30, wherein said first plurality of genes consists of at least 5 or more of the genes for which biomarkers are listed in Table 2a and said second plurality of genes consists of at least 5 or more genes for which biomarkers are listed in Table 2b.

32. The method of claim 30, wherein said first plurality of genes consists of at least 10 or more of the genes for which biomarkers are listed in Table 2a and said second plurality of genes consists of at least 10 or more genes for which biomarkers are listed in Table 2b.

33. The method of claim 30, wherein said first plurality of genes consists of at least 20 or more of the genes for which biomarkers are listed in Table 2a and said second plurality of genes consists of at least 20 or more genes for which biomarkers are listed in Table 2b.

34. The method of claim 30, wherein said first plurality of genes consists of all of the genes listed in Table 2a and said second plurality of genes consists of all of the genes for which biomarkers are listed in Table 2b.

35. The method of claim 30, wherein said differential expression value is log(10) ratio.

36. The method of claim 30, wherein said threshold is 0.

37. The method of claim 30, wherein said signature scores is statistically significant if it has a p-value less than 0.05.
